(19) United States
(12) Patent Application Publication
(10) Pub. No.: US 2022/0348948 A1
(43) Pub. Date: Nov. 3, 2022

(54) TRANSGENIC PLANTS HAVING INCREASED TOLERANCE TO ALUMINUM

(71) Applicant: CERES, INC., Thousand Oaks, CA (US)

(72) Inventors: Julissa Sosa, Northridge, CA (US); Wuyi Wang, Newbury Park, CA (US)

(21) Appl. No.: 17/724,916

(22) Filed: Apr. 20, 2022

Related U.S. Application Data
(62) Division of application No. 16/575,915, filed on Sep. 19, 2019, now Pat. No. 11,339,403.
Application No. 16/575,915 is a division of application No. 15/881,134, filed on Jan. 26, 2018, now Pat. No. 10,472,646.
Application No. 15/881,134 is a division of application No. 14/355,530, filed on Apr. 30, 2014, now Pat. No. 9,938,536.
(60) Provisional application No. 61/554,788, filed on Nov. 2, 2011.

(51) Int. Cl. C12N 15/82; A23L 5/00; A23L 7/10; A23L 25/00; A23K 10/00; C07K 14/415

(52) U.S. Cl. CPC C12N 15/8271; A23L 5/00; A23L 7/10; A23L 25/00; A23K 10/00; C07K 14/415; C12N 15/8216; A23V 2002/00

(57) ABSTRACT

Methods and materials for modulating aluminum tolerance in plants are disclosed. For example, nucleic acids encoding aluminum tolerance-modulating polypeptides are disclosed as well as methods for using such nucleic acids to transform plant cells. Also disclosed are plants having increased tolerance to aluminum and methods of increasing plant yield in soil containing elevated levels of aluminum.

### CROSS-REFERENCE TO RELATED APPLICATION

[0001] This application claims priority to U.S. Application Ser. No. 61/554,788, filed on Nov. 2, 2011, entitled TRANSGENIC PLANTS HAVING INCREASED TOLERANCE TO ALUMINUM, the disclosure of which is incorporated herein by reference.

### TECHNICAL FIELD

[0002] This document relates to methods and materials involved in modulating tolerance to abiotic stress in plants. For example, this document provides plants having increased aluminum tolerance, materials and methods for making plants having increased aluminum tolerance, as well as methods of increasing plant yield in soil containing elevated levels of aluminum.

### INCORPORATION-BY-REFERENCE OF SEQUENCE LISTING

[0003] The material in the accompanying sequence listing is hereby incorporated by reference into this application. The accompanying file, named Sequence_Listing_2012-10-30.txt was created on Oct. 30, 2012, and is 1.69 MB. The file can be accessed using Microsoft Word on a computer that uses Windows OS.

### BACKGROUND

[0004] Aluminum (Al) is ubiquitous in soils and at pH values below 5.0, is solubilized into the soil solution as the highly phytotoxic Al³⁺ species, which inhibits root growth and damages root systems (Kochian, 1995, Annu. Rev. Plant Biol. 46: 237-260). As such, aluminum toxicity is aggravated by acid precipitation (e.g., acid rain). For example, contaminated soils in Brazil contain aluminum in amounts that range from 11 to 124 g/Kg of soil. Another constraint on acid soils is phosphorous (P) deficiency, which is caused by P fixation with Al and Fe oxides on the surface of clay minerals in acid soils. See Sanchez et al. 1997. In: Replenishing Soil Fertility in Africa, ed. R Buresh, P Sanchez, F Calhoun, pp. 1-46). Root damage reduces water and nutrient uptake and thus crop productivity. Low soil pH has been documented to reduce the yield on nearly 25% of the world's land presently under production. See, Wood, et al. (2000) in Pilot Analysis of Global Ecosystems: Agroecosystems (Int. Food Policy Res, Inst. And World Resources Inst., Washington, D.C.), pp 45-54). Thus, there is a need to provide methods and materials for increasing aluminum tolerance in plants.

### SUMMARY

[0005] This document provides methods and materials related to plants having increased tolerance to aluminum (Al³⁺). For example, this document provides transgenic plants and plant cells having increased tolerance to aluminum, nucleic acids used to generate transgenic plants and plant cells having increased tolerance to aluminum, methods for making plants having increased tolerance to aluminum, and methods for making plant cells that can be used to generate plants having increased tolerance to aluminum. Such plants and plant cells can be grown in acidic soils containing elevated levels of Al³⁺, resulting in increased yield in such soils.

[0006] In one aspect, this document features a method of increasing plant yield in soil containing elevated levels of Al³⁺. The method includes growing a plant comprising an exogenous nucleic acid on soil having an elevated level of Al³⁺, wherein yield of the plant is increased as compared to the corresponding yield of a control plant that does not comprise said nucleic acid.

[0007] In some embodiments, the exogenous nucleic acid includes a regulatory region operably linked to a nucleotide sequence encoding a polypeptide, wherein the HMM bit score of the amino acid sequence of the polypeptide is greater than about 65, the HMM based on the amino acid sequences depicted in any one of FIGS. 1-4.

[0008] In some embodiments, the exogenous nucleic acid includes a regulatory region operably linked to a nucleotide sequence encoding a polypeptide having 90 percent or greater sequence identity to an amino acid sequence set forth in SEQ ID NOs: 2, 3, 4, 5, 7, 8, 9, 10, 11, 12, 13, 14, 15, 17, 19, 20, 22, 24, 26, 28, 29, 31, 32, 33, 35, 36, 38, 40, 41, 42, 43, 44, 45, 47, 48, 49, 50, 52, 54, 55, 56, 57, 58, 59, 61, 63, 64, 65, 66, 67, 69, 70, 72, 73, 75, 77, 78, 79, 81, 82, 83, 84, 85, 86, 87, 88, 89, 90, 91, 93, 94, 96, 97, 98, 99, 100, 102, 103, 104, 105, 106, 107, 108, 109, 110, 111, 113, 115, 117, 119, 120, 121, 122, 124, 125, 126, 127, 129, 131, 132, 134, 136, 137, 138, 140, 142, 144, 146, 147, 148, 149, 150, 151, 152, 153, 154, 155, 156, 158, 159, 160, 162, 163, 164, 166, 167, 169, 171, 172, 173, 174, 175, 176, 177, 178, 179, 180, 181, 182, 183, 184, 185, 186, 187, 188, 190, 191, 192, 193, 194, 195, 197, 198, 199, 200, 201, 202, 203, 205, 207, 209, 211, 212, 213, 214, 215, 216, 217, 218, 219, 220, 221, 223, 224, 225, 227, 228, 229, 230, 231, 232, 233, 234, 235, 237, 239, 241, 243, 245, 246, 248, 250, 251, 253, 255, 257, 258, 259, 261, 263, 265, 267, 269, 271, 273, 274, 276, 278, 280, 281, 283, 284, 285, 287, 288, 290, 292, 293, 294, 296, 298, 300, 302, 304, 306, 308, 310, 312, 314, 316, 318, 320, 322, 324, 326, 328, 329, 331, 333, 335, 337, 338, 339, 341, 342, 343, 344, 345, 346, 347, 348, 349, 350, 351, 353, 355, 357, 358, 360, 362, 364, 366, 368, 369, 371, 373, 375, 376, 377, 378, 379, 380, 382, 384, 386, 388, 390, 392, 393, 395, 396, 397, 398, 399, 400, 401, 402, 404, 405, 407, 409, 411, 413, 414, 416, 418, 420, 421, 423, 424, 425, 426, 428, 429, 431, 432, 433, 434, 435, 436, 437, 438, 439, 440, 441, 442, 443, 444, 445, 446, 447, 449, 451, 453, 454, 456, 457, 458, 459, 460, 461, 462, 463, 465, 467, 468, 469, 470, 471, 472, 473, 474, 475, 476, 478, 480, 482, 484, 486, 488, 490, 492, 494, 496, 498, 500, 502, 504, 506, 508, 510, 512, 514, 516, 518, 520, 522, 524, 526, 528, 530, 532, 534, 535, 537, 539, 540, 542, 544, 545, 547, 549, 551, 553, 555, 557, 558, 560, 562, 564, 568, 570, 572, 574, 576, 578, 579, 580, 581, 583, 585, 587, 589, 591, 593, 595, 597, 599, 601, 603, 605, 607, 608, 610, 612, 614, 616, 618, 620, 622, 624, 625, 627, 629, 631, 633, 635, 637, 639, 641, 643, 645, 647, 649, 650, 651, 652, 653, 654, 655, 656, 657, 658, 660, 662, 664, 666, 668, 669, 670, 671, 672, 673, 674, 675, 676, 677, 679, 681, 683, 685, 686, 687, 689, 691, 693, 695, 696, 698, 699, 701, 702, 703, 704, 705, 706, 707, 709, 710, 711, 712, 713, 714, 715, 716, 717, 718, 719, 721, 722, 723, 724, 725, 726, 727, 728, 729, 730, 731, 732, 733, 734, 735, 736, 737, 738, 739, 740, 742, 744, 745, 746, 747, 749, 750, 752, 753, 754, 755, 757, 759, 760, 761, 762, 764, 765, 766, 767, 768, 769, 770, 771, and 772.

[0009] In some embodiments, the exogenous nucleic acid includes a regulatory region operably linked to a nucleotide sequence having 90 percent or greater sequence identity to the nucleotide sequence set forth in SEQ ID NOs: 1, 6, 16, 18, 21, 23, 25, 27, 30, 34, 37, 39, 46, 51, 53, 60, 62, 68, 71, 74, 76, 80, 92, 95, 101, 112, 114, 116, 118, 123, 128, 130, 133, 135, 139, 141, 143, 145, 157, 161, 165, 168, 170, 189, 196, 204, 206, 208, 210, 222, 226, 236, 238, 240, 242, 244, 247, 249, 252, 254, 256, 260, 262, 264, 266, 268, 270, 272, 275, 277, 279, 282, 286, 289, 291, 295, 297, 299, 301, 303, 305, 307, 309, 311, 313, 315, 317, 319, 321, 323, 325, 327, 330, 332, 334, 336, 340, 352, 354, 356, 359, 361, 363, 365, 367, 370, 372, 374, 381, 383, 385, 387, 389, 391, 394, 403, 406, 408, 410, 412, 415, 417, 419, 422, 427, 430, 448, 450, 452, 455, 464, 466, 477, 479, 481, 483, 485, 487, 489, 491, 493, 495, 497, 499, 501, 503, 505, 507, 509, 511, 513, 515, 517, 519, 521, 523, 525, 527, 529, 531, 533, 536, 538, 541, 543, 546, 548, 550, 552, 554, 556, 559, 561, 563, 567, 569, 571, 573, 575, 577, 582, 584, 586, 588, 590, 592, 594, 596, 598, 600, 602, 604, 606, 609, 611, 613, 615, 617, 619, 621, 623, 626, 628, 630, 632, 634, 636, 638, 640, 642, 644, 646, 648, 659, 661, 663, 665, 667, 678, 680, 682, 684, 688, 690, 692, 694, 697, 700, 708, 720, 741, 743, 748, 751, 756, 758, and 763.

[0010] In any of the methods described herein, the nucleotide sequence can encode a polypeptide having 95 percent or greater sequence identity to the amino acid sequence set forth in SEQ ID NOs: 2, 3, 4, 5, 7, 8, 9, 10, 11, 12, 13, 14, 15, 17, 19, 20, 22, 24, 26, 28, 29, 31, 32, 33, 35, 36, 38, 40, 41, 42, 43, 44, 45, 47, 48, 49, 50, 52, 54, 55, 56, 57, 58, 59, 61, 63, 64, 65, 66, 67, 69, 70, 72, 73, 75, 77, 78, 79, 81, 82, 83, 84, 85, 86, 87, 88, 89, 90, 91, 93, 94, 96, 97, 98, 99, 100, 102, 103, 104, 105, 106, 107, 108, 109, 110, 111, 113, 115, 117, 119, 120, 121, 122, 124, 125, 126, 127, 129, 131, 132, 134, 136, 137, 138, 140, 142, 144, 146, 147, 148, 149, 150, 151, 152, 153, 154, 155, 156, 158, 159, 160, 162, 163, 164, 166, 167, 169, 171, 172, 173, 174, 175, 176, 177, 178, 179, 180, 181, 182, 183, 184, 185, 186, 187, 188, 190, 191, 192, 193, 194, 195, 197, 198, 199, 200, 201, 202, 203, 205, 207, 209, 211, 212, 213, 214, 215, 216, 217, 218, 219, 220, 221, 223, 224, 225, 227, 228, 229, 230, 231, 232, 233, 234, 235, 237, 239, 241, 243, 245, 246, 248, 250, 251, 253, 255, 257, 258, 259, 261, 263, 265, 267, 269, 271, 273, 274, 276, 278, 280, 281, 283, 284, 285, 287, 288, 290, 292, 293, 294, 296, 298, 300, 302, 304, 306, 308, 310, 312, 314, 316, 318, 320, 322, 324, 326, 328, 329, 331, 333, 335, 337, 338, 339, 341, 342, 343, 344, 345, 346, 347, 348, 349, 350, 351, 353, 355, 357, 358, 360, 362, 364, 366, 368, 369, 371, 373, 375, 376, 377, 378, 379, 380, 382, 384, 386, 388, 390, 392, 393, 395, 396, 397, 398, 399, 400, 401, 402, 404, 405, 407, 409, 411, 413, 414, 416, 418, 420, 421, 423, 424, 425, 426, 428, 429, 431, 432, 433, 434, 435, 436, 437, 438, 439, 440, 441, 442, 443, 444, 445, 446, 447, 449, 451, 453, 454, 456, 457, 458, 459, 460, 461, 462, 463, 465, 467, 468, 469, 470, 471, 472, 473, 474, 475, 476, 478, 480, 482, 484, 486, 488, 490, 492, 494, 496, 498, 500, 502, 504, 506, 508, 510, 512, 514, 516, 518, 520, 522, 524, 526, 528, 530, 532, 534, 535, 537, 539, 540, 542, 544, 545, 547, 549, 551, 553, 555, 557, 558, 560, 562, 564, 568, 570, 572, 574, 576, 578, 579, 580, 581, 583, 585, 587, 589, 591, 593, 595, 597, 599, 601, 603, 605, 607, 608, 610, 612, 614, 616, 618, 620, 622, 624, 625, 627, 629, 631, 633, 635, 637, 639, 641, 643, 645, 647, 649, 650, 651, 652, 653, 654, 655, 656,657, 658, 660, 662, 664, 666, 668, 669, 670, 671, 672, 673, 674, 675, 676, 677, 679, 681, 683, 685, 686, 687, 689, 691, 693, 695, 696, 698, 699, 701, 702, 703, 704, 705, 706, 707, 709, 710, 711, 712, 713, 714, 715, 716, 717, 718, 719, 721, 722, 723, 724, 725, 726, 727, 728, 729, 730, 731, 732, 733, 734, 735, 736, 737, 738, 739, 740, 742, 744, 745, 746, 747, 749, 750, 752, 753, 754, 755, 757, 759, 760, 761, 762, 764, 765, 766, 767, 768, 769,770, 771, and 772.

[0011] In any of the methods described herein, the nucleotide sequence can encode a polypeptide having 98 percent or greater sequence identity to the amino acid sequence set forth in SEQ ID NOs: 2, 3, 4, 5, 7, 8, 9, 10, 11, 12, 13, 14, 15, 17, 19, 20, 22, 24, 26, 28, 29, 31, 32, 33, 35, 36, 38, 40, 41, 42, 43, 44, 45, 47, 48, 49, 50, 52, 54, 55, 56, 57, 58, 59, 61, 63, 64, 65, 66, 67, 69, 70, 72, 73, 75, 77, 78, 79, 81, 82, 83, 84, 85, 86, 87, 88, 89, 90, 91, 93, 94, 96, 97, 98, 99, 100, 102, 103, 104, 105, 106, 107, 108, 109, 110, 111, 113, 115, 117, 119, 120, 121, 122, 124, 125, 126, 127, 129, 131, 132, 134, 136, 137, 138, 140, 142, 144, 146, 147, 148, 149, 150, 151, 152, 153, 154, 155, 156, 158, 159, 160, 162, 163, 164, 166, 167, 169, 171, 172, 173, 174, 175, 176, 177, 178, 179, 180, 181, 182, 183, 184, 185, 186, 187, 188, 190, 191, 192, 193, 194, 195, 197, 198, 199, 200, 201, 202, 203, 205, 207, 209, 211, 212, 213, 214, 215, 216, 217, 218, 219, 220, 221, 223, 224, 225, 227, 228, 229, 230, 231, 232, 233, 234, 235, 237, 239, 241, 243, 245, 246, 248, 250, 251, 253, 255, 257, 258, 259, 261, 263, 265, 267, 269, 271, 273, 274, 276, 278, 280, 281, 283, 284, 285, 287, 288, 290, 292, 293, 294, 296, 298, 300, 302, 304, 306, 308, 310, 312, 314, 316, 318, 320, 322, 324, 326, 328, 329, 331, 333, 335, 337, 338, 339, 341, 342, 343, 344, 345, 346, 347, 348, 349, 350, 351, 353, 355, 357, 358, 360, 362, 364, 366, 368, 369, 371, 373, 375, 376, 377, 378, 379, 380, 382, 384, 386, 388, 390, 392, 393, 395, 396, 397, 398, 399, 400, 401, 402, 404, 405, 407, 409, 411, 413, 414, 416, 418, 420, 421, 423, 424, 425, 426, 428, 429, 431, 432, 433, 434, 435, 436, 437, 438, 439, 440, 441, 442, 443, 444, 445, 446, 447, 449, 451, 453, 454, 456, 457, 458, 459, 460, 461, 462, 463, 465, 467, 468, 469, 470, 471, 472, 473, 474, 475, 476, 478, 480, 482, 484, 486, 488, 490, 492, 494, 496, 498, 500, 502, 504, 506, 508, 510, 512, 514, 516, 518, 520, 522, 524, 526, 528, 530, 532, 534, 535, 537, 539, 540, 542, 544, 545, 547, 549, 551, 553, 555, 557, 558,560, 562, 564, 568, 570, 572, 574, 576, 578, 579, 580, 581, 583, 585, 587, 589, 591, 593, 595, 597, 599, 601, 603, 605, 607, 608, 610, 612, 614, 616, 618, 620, 622, 624, 625, 627, 629, 631, 633, 635, 637, 639, 641, 643, 645, 647, 649, 650, 651, 652, 653, 654, 655, 656,657, 658, 660, 662, 664, 666, 668, 669, 670, 671, 672, 673, 674, 675, 676, 677, 679, 681, 683, 685, 686, 687, 689, 691, 693, 695, 696, 698, 699, 701, 702, 703, 704, 705, 706, 707, 709, 710, 711, 712, 713, 714, 715, 716, 717, 718, 719, 721, 722, 723, 724, 725, 726, 727, 728, 729, 730, 731, 732, 733, 734, 735, 736, 737, 738, 739, 740, 742, 744, 745, 746, 747, 749, 750, 752, 753, 754, 755, 757, 759, 760, 761, 762, 764, 765, 766, 767, 768, 769,770, 771, and 772.

[0012] In any of the methods described herein, the nucleotide sequence can have 95 percent or greater (e.g., 98 percent or 99 percent or greater) sequence identity to the nucleotide sequence set forth in SEQ ID NOs: 1, 6, 16, 18, 21, 23, 25, 27, 30, 34, 37, 39, 46, 51, 53, 60, 62, 68, 71, 74, 76, 80, 92, 95, 101, 112, 114, 116, 118, 123, 128, 130, 133, 135, 139, 141, 143, 145, 157, 161, 165, 168, 170, 189, 196, 204, 206, 208, 210, 222, 226, 236, 238, 240, 242, 244, 247, 249, 252, 254, 256, 260, 262, 264, 266, 268, 270, 272, 275, 277, 279, 282, 286, 289, 291, 295, 297, 299, 301, 303, 305, 307, 309, 311, 313, 315, 317, 319, 321, 323, 325, 327, 330, 332, 334, 336, 340, 352, 354, 356, 359, 361, 363, 365, 367, 370, 372, 374, 381, 383, 385, 387, 389, 391, 394, 403, 406, 408, 410, 412, 415, 417, 419, 422, 427, 430, 448, 450, 452, 455, 464, 466, 477, 479, 481, 483, 485, 487, 489, 491, 493, 495, 497, 499, 501, 503, 505, 507, 509, 511, 513, 515, 517, 519, 521, 523, 525, 527, 529, 531, 533, 536, 538, 541, 543, 546, 548, 550, 552, 554, 556, 559, 561, 563, 567, 569, 571, 573, 575, 577, 582, 584, 586, 588, 590, 592, 594, 596, 598, 600, 602, 604, 606, 609, 611, 613, 615, 617, 619, 621, 623, 626, 628, 630, 632, 634, 636, 638, 640, 642, 644, 646, 648, 659, 661, 663, 665, 667, 678, 680, 682, 684, 688, 690, 692, 694, 697, 700, 708, 720, 741, 743, 748, 751, 756, 758, and 763.

[0013] In any of the methods described herein, the nucleotide sequence can encode the polypeptide set forth in SEQ ID NOs: 2, 3, 4, 5, 7, 8, 9, 10, 11, 12, 13, 14, 15, 17, 19, 20, 22, 24, 26, 28, 29, 31, 32, 33, 35, 36, 38, 40, 41, 42, 43, 44, 45, 47, 48, 49, 50, 52, 54, 55, 56, 57, 58, 59, 61, 63, 64, 65, 66, 67, 69, 70, 72, 73, 75, 77, 78, 79, 81, 82, 83, 84, 85, 86, 87, 88, 89, 90, 91, 93, 94, 96, 97, 98, 99, 100, 102, 103, 104, 105, 106, 107, 108, 109, 110, 111, 113, 115, 117, 119, 120, 121, 122, 124, 125, 126, 127, 129, 131, 132, 134, 136, 137, 138, 140, 142, 144, 146, 147, 148, 149, 150, 151, 152, 153, 154, 155, 156, 158, 159, 160, 162, 163, 164, 166, 167, 169, 171, 172, 173, 174, 175, 176, 177, 178, 179, 180, 181, 182, 183, 184, 185, 186, 187, 188, 190, 191, 192, 193, 194, 195, 197, 198, 199, 200, 201, 202, 203, 205, 207, 209, 211, 212, 213, 214, 215, 216, 217, 218, 219, 220, 221, 223, 224, 225, 227, 228, 229, 230, 231, 232, 233, 234, 235, 237, 239, 241, 243, 245, 246, 248, 250, 251, 253, 255, 257, 258, 259, 261, 263, 265, 267, 269, 271, 273, 274, 276, 278, 280, 281, 283, 284, 285, 287, 288, 290, 292, 293, 294, 296, 298, 300, 302, 304, 306, 308, 310, 312, 314, 316, 318, 320, 322, 324, 326, 328, 329, 331, 333, 335, 337, 338, 339, 341, 342, 343, 344, 345, 346, 347, 348, 349, 350, 351, 353, 355, 357, 358, 360, 362, 364, 366, 368, 369, 371, 373, 375, 376, 377, 378, 379, 380, 382, 384, 386, 388, 390, 392, 393, 395, 396, 397, 398, 399, 400, 401, 402, 404, 405, 407, 409, 411, 413, 414, 416, 418, 420, 421, 423, 424, 425, 426, 428, 429, 431, 432, 433, 434, 435, 436, 437, 438, 439, 440, 441, 442, 443, 444, 445, 446, 447, 449, 451, 453, 454, 456, 457, 458, 459, 460, 461, 462, 463, 465, 467, 468, 469, 470, 471, 472, 473, 474, 475, 476, 478, 480, 482, 484, 486, 488, 490, 492, 494, 496, 498, 500, 502, 504, 506, 508, 510, 512, 514, 516, 518, 520, 522, 524, 526, 528, 530, 532, 534, 535, 537, 539, 540, 542, 544, 545, 547, 549, 551, 553, 555, 557, 558, 560, 562, 564, 568, 570, 572, 574, 576, 578, 579, 580, 581, 583, 585, 587, 589, 591, 593, 595, 597, 599, 601, 603, 605, 607, 608, 610, 612, 614, 616, 618, 620, 622, 624, 625, 627, 629, 631, 633, 635, 637, 639, 641, 643, 645, 647, 649, 650, 651, 652, 653, 654, 655, 656,657, 658, 660, 662, 664, 666, 668, 669, 670, 671, 672, 673, 674, 675, 676, 677, 679, 681, 683, 685, 686, 687, 689, 691, 693, 695, 696, 698, 699, 701, 702, 703, 704, 705, 706, 707, 709, 710, 711, 712, 713, 714, 715, 716, 717, 718, 719, 721, 722, 723, 724, 725, 726, 727, 728, 729, 730, 731, 732, 733, 734, 735, 736, 737, 738, 739, 740, 742, 744, 745, 746, 747, 749, 750, 752, 753, 754, 755, 757, 759, 760, 761, 762, 764, 765, 766, 767, 768, 769,770, 771, and 772.

[0014] In any of the methods described herein, the method further can include harvesting biomass from the plant.

[0015] In any of the methods described herein, the regulatory region can be a promoter. For example, the promoter can be selected from the group consisting of YP0092, PT0676, PT0708, PT0613, PT0672, PT0678, PT0688, PT0837, the napin promoter, the Arcelin-5 promoter, the phaseolin gene promoter, the soybean trypsin inhibitor promoter, the ACP promoter, the stearoyl-ACP desaturase gene promoter, the soybean α′ subunit of β-conglycinin promoter, the oleosin promoter, the 15 kD zein promoter, the 16 kD zein promoter, the 19 kD zein promoter, the 22 kD zein promoter, the 27 kD zein promoter, the Osgt-1 promoter, the beta-amylase gene promoter, the barley hordein gene promoter, p326, YP0144, YP190, p13879, YP0050, p32449, 21876, YP0158, YP0214, YP0380, PT0848, PT0633, the cauliflower mosaic virus (CaMV) 35S promoter, the mannopine synthase (MAS) promoter, the 1′ or 2′ promoters derived from T-DNA of Agrobacterium tumefaciens, the figwort mosaic virus 34S promoter, rice actin promoter, maize ubiquitin-1 promoter, ribulose-1,5-bisphosphate carboxylase (RbcS) promoter, the pine cab6 promoter, the Cab-1 gene promoter from wheat, the CAB-1 promoter from spinach, the cablR promoter from rice, the pyruvate orthophosphate dikinase (PPDK) promoter from corn, the tobacco Lhcb1*2 promoter, the Arabidopsis thaliana SUC2 sucrose-H+ symporter promoter, and a thylakoid membrane protein promoter from spinach, and PT0585.

[0016] In any of the methods described herein, the plant containing the exogenous nucleic acid can have an improved growth rate relative to a corresponding plant that does not contain the nucleic acid.

[0017] In any of the methods described herein, the plant containing the exogenous nucleic acid can have improved vegetative growth relative to a corresponding plant that does not contain nucleic acid.

[0018] This document also features a method of increasing tolerance of a plant to elevated levels of aluminum. The method includes introducing into a plurality of plant cells an isolated nucleic acid comprising a nucleic acid sequence encoding a polypeptide having 90 percent or greater sequence identity to an amino acid sequence set forth in SEQ ID NOs: 2, 3, 4, 5, 7, 8, 9, 10, 11, 12, 13, 14, 15, 17, 19, 20, 22, 24, 26, 28, 29, 31, 32, 33, 35, 36, 38, 40, 41, 42, 43, 44, 45, 47, 48, 49, 50, 52, 54, 55, 56, 57, 58, 59, 61, 63, 64, 65, 66, 67, 69, 70, 72, 73, 75, 77, 78, 79, 81, 82, 83, 84, 85, 86, 87, 88, 89, 90, 91, 93, 94, 96, 97, 98, 99, 100, 102, 103, 104, 105, 106, 107, 108, 109, 110, 111, 113, 115, 117, 119, 120, 121, 122, 124, 125, 126, 127, 129, 131, 132, 134, 136, 137, 138, 140, 142, 144, 146, 147, 148, 149, 150, 151, 152, 153, 154, 155, 156, 158, 159, 160, 162, 163, 164, 166, 167, 169, 171, 172, 173, 174, 175, 176, 177, 178, 179, 180, 181, 182, 183, 184, 185, 186, 187, 188, 190, 191, 192, 193, 194, 195, 197, 198, 199, 200, 201, 202, 203, 205, 207, 209, 211, 212, 213, 214, 215, 216, 217, 218, 219, 220, 221, 223, 224, 225, 227, 228, 229, 230, 231, 232, 233, 234, 235, 237, 239, 241, 243, 245, 246, 248, 250, 251, 253, 255, 257, 258, 259, 261, 263, 265, 267, 269, 271, 273, 274, 276, 278, 280, 281, 283, 284, 285, 287, 288, 290, 292, 293, 294, 296, 298, 300, 302, 304, 306, 308, 310, 312, 314, 316, 318, 320, 322, 324, 326, 328, 329, 331, 333, 335, 337, 338, 339, 341, 342, 343, 344, 345, 346, 347, 348, 349, 350, 351, 353, 355, 357, 358, 360, 362, 364, 366, 368, 369, 371, 373, 375, 376, 377, 378, 379, 380, 382, 384, 386, 388, 390, 392, 393, 395, 396, 397, 398, 399, 400, 401, 402, 404, 405, 407, 409, 411, 413, 414, 416, 418, 420, 421, 423, 424, 425, 426, 428, 429, 431, 432, 433, 434, 435, 436, 437, 438, 439, 440, 441, 442, 443, 444, 445, 446, 447, 449, 451, 453, 454, 456, 457, 458, 459, 460, 461, 462, 463, 465, 467, 468, 469, 470, 471, 472, 473, 474, 475, 476, 478, 480, 482, 484, 486, 488, 490, 492, 494, 496, 498, 500, 502, 504, 506, 508, 510, 512, 514, 516, 518, 520, 522, 524, 526, 528, 530, 532, 534, 535, 537, 539, 540, 542, 544, 545, 547, 549, 551, 553, 555, 557, 558,560, 562, 564, 568, 570, 572, 574, 576, 578, 579, 580, 581, 583, 585, 587, 589, 591, 593, 595, 597, 599, 601, 603, 605, 607, 608, 610, 612, 614, 616, 618, 620, 622, 624, 625, 627, 629, 631, 633, 635, 637, 639, 641, 643, 645, 647, 649, 650, 651, 652, 653, 654, 655, 656,657, 658, 660, 662, 664, 666, 668, 669, 670, 671, 672, 673, 674, 675, 676, 677, 679, 681, 683, 685, 686, 687, 689, 691, 693, 695, 696, 698, 699, 701, 702, 703, 704, 705, 706, 707, 709, 710, 711, 712, 713, 714, 715, 716, 717, 718, 719, 721, 722, 723, 724, 725, 726, 727, 728, 729, 730, 731, 732, 733, 734, 735, 736, 737, 738, 739, 740, 742, 744, 745, 746, 747, 749, 750, 752, 753, 754, 755, 757, 759, 760, 761, 762, 764, 765, 766, 767, 768, 769,770, 771, and 772; producing a plant from the plant cell; and growing the plant on soil having an elevated level of Al³⁺, wherein the plant has increased yield as compared to that of a control plant that does not comprise the nucleic acid. The nucleic acid sequence encoding the polypeptide can be operably linked to a regulatory region.

[0019] This document also features a method of increasing tolerance of a plant to elevated levels of aluminum. The method includes introducing into a plurality of plant cells an isolated nucleic acid comprising a nucleic acid sequence encoding a polypeptide having 90 percent or greater sequence identity to an amino acid sequence set forth in SEQ ID NOs: 2, 3, 4, 5, 7, 8, 9, 10, 11, 12, 13, 14, 15, 17, 19, 20, 22, 24, 26, 28, 29, 31, 32, 33, 35, 36, 38, 40, 41, 42, 43, 44, 45, 47, 48, 49, 50, 52, 54, 55, 56, 57, 58, 59, 61, 63, 64, 65, 66, 67, 69, 70, 72, 73, 75, 77, 78, 79, 81, 82, 83, 84, 85, 86, 87, 88, 89, 90, 91, 93, 94, 96, 97, 98, 99, 100, 102, 103, 104, 105, 106, 107, 108, 109, 110, 111, 113, 115, 117, 119, 120, 121, 122, 124, 125, 126, 127, 129, 131, 132, 134, 136, 137, 138, 140, 142, 144, 146, 147, 148, 149, 150, 151, 152, 153, 154, 155, 156, 158, 159, 160, 162, 163, 164, 166, 167, 169, 171, 172, 173, 174, 175, 176, 177, 178, 179, 180, 181, 182, 183, 184, 185, 186, 187, 188, 190, 191, 192, 193, 194, 195, 197, 198, 199, 200, 201, 202, 203, 205, 207, 209, 211, 212, 213, 214, 215, 216, 217, 218, 219, 220, 221, 223, 224, 225, 227, 228, 229, 230, 231, 232, 233, 234, 235, 237, 239, 241, 243, 245, 246, 248, 250, 251, 253, 255, 257, 258, 259, 261, 263, 265, 267, 269, 271, 273, 274, 276, 278, 280, 281, 283, 284, 285, 287, 288, 290, 292, 293, 294, 296, 298, 300, 302, 304, 306, 308, 310, 312, 314, 316, 318, 320, 322, 324, 326, 328, 329, 331, 333, 335, 337, 338, 339, 341, 342, 343, 344, 345, 346, 347, 348, 349, 350, 351, 353, 355, 357, 358, 360, 362, 364, 366, 368, 369, 371, 373, 375, 376, 377, 378, 379, 380, 382, 384, 386, 388, 390, 392, 393, 395, 396, 397, 398, 399, 400, 401, 402, 404, 405, 407, 409, 411, 413, 414, 416, 418, 420, 421, 423, 424, 425, 426, 428, 429, 431, 432, 433, 434, 435, 436, 437, 438, 439, 440, 441, 442, 443, 444, 445, 446, 447, 449, 451, 453, 454, 456, 457, 458, 459, 460, 461, 462, 463, 465, 467, 468, 469, 470, 471, 472, 473, 474, 475, 476, 478, 480, 482, 484, 486, 488, 490, 492, 494, 496, 498, 500, 502, 504, 506, 508, 510, 512, 514, 516, 518, 520, 522, 524, 526, 528, 530, 532, 534, 535, 537, 539, 540, 542, 544, 545, 547, 549, 551, 553, 555, 557, 558, 560, 562, 564, 568, 570, 572, 574, 576, 578, 579, 580, 581, 583, 585, 587, 589, 591, 593, 595, 597, 599, 601, 603, 605, 607, 608, 610, 612, 614, 616, 618, 620, 622, 624, 625, 627, 629, 631, 633, 635, 637, 639, 641, 643, 645, 647, 649, 650, 651, 652, 653, 654, 655, 656,657, 658, 660, 662, 664, 666, 668, 669, 670, 671, 672, 673, 674, 675, 676, 677, 679, 681, 683, 685, 686, 687, 689, 691, 693, 695, 696, 698, 699, 701, 702, 703, 704, 705, 706, 707, 709, 710, 711, 712, 713, 714, 715, 716, 717, 718, 719, 721, 722, 723, 724, 725, 726, 727, 728, 729, 730, 731, 732, 733, 734, 735, 736, 737, 738, 739, 740, 742, 744, 745, 746, 747, 749, 750, 752, 753, 754, 755, 757, 759, 760, 761, 762, 764, 765, 766, 767, 768, 769, 770, 771, and 772; and selecting a plant produced from the plurality of plant cells that has an increased tolerance to elevated Al³⁺ as compared to the tolerance in a corresponding control plant that does not comprise the isolated nucleic acid. The nucleic acid sequence encoding the polypeptide can be operably linked to a regulatory region.

[0020] This document also features a plant cell that contains an exogenous nucleic acid, the exogenous nucleic acid comprising a regulatory region operably linked to a nucleotide sequence encoding a polypeptide, wherein the HMM bit score of the amino acid sequence of the polypeptide is greater than about 65, the HMM based on the amino acid sequence depicted in any one of FIGS. 1-4, and wherein a plant produced from the plant cell is tolerant of elevated soil levels of Al³⁺ as compared to that of a control plant that does not comprise the nucleic acid, and wherein the plant is not tolerant of elevated saline levels.

[0021] This document also features a plant cell that contains an exogenous nucleic acid, the exogenous nucleic acid comprising a regulatory region operably linked to a nucleotide sequence encoding a polypeptide having 90 percent or greater sequence identity to an amino acid sequence set forth in SEQ ID NOs: 2, 3, 4, 5, 7, 8, 9, 10, 11, 12, 13, 14, 15, 17, 19, 20, 22, 24, 26, 28, 29, 31, 32, 33, 35, 36, 38, 40, 41, 42, 43, 44, 45, 47, 48, 49, 50, 52, 54, 55, 56, 57, 58, 59, 61, 63, 64, 65, 66, 67, 69, 70, 72, 73, 75, 77, 78, 79, 81, 82, 83, 84, 85, 86, 87, 88, 89, 90, 91, 93, 94, 96, 97, 98, 99, 100, 102, 103, 104, 105, 106, 107, 108, 109, 110, 111, 113, 115, 117, 119, 120, 121, 122, 124, 125, 126, 127, 129, 131, 132, 134, 136, 137, 138, 140, 142, 144, 146, 147, 148, 149, 150, 151, 152, 153, 154, 155, 156, 158, 159, 160, 162, 163, 164, 166, 167, 169, 171, 172, 173, 174, 175, 176, 177, 178, 179, 180, 181, 182, 183, 184, 185, 186, 187, 188, 190, 191, 192, 193, 194, 195, 197, 198, 199, 200, 201, 202, 203, 205, 207, 209, 211, 212, 213, 214, 215, 216, 217, 218, 219, 220, 221, 223, 224, 225, 227, 228, 229, 230, 231, 232, 233, 234, 235, 237, 239, 241, 243, 245, 246, 248, 250, 251, 253, 255, 257, 258, 259, 261, 263, 265, 267, 269, 271, 273, 274, 276, 278, 280, 281, 283, 284, 285, 287, 288, 290, 292, 293, 294, 296, 298, 300, 302, 304, 306, 308, 310, 312, 314, 316, 318, 320, 322, 324, 326, 328, 329, 331, 333, 335, 337, 338, 339, 341, 342, 343, 344, 345, 346, 347, 348, 349, 350, 351, 353, 355, 357, 358, 360, 362, 364, 366, 368, 369, 371, 373, 375, 376, 377, 378, 379, 380, 382, 384, 386, 388, 390, 392, 393, 395, 396, 397, 398, 399, 400, 401, 402, 404, 405, 407, 409, 411, 413, 414, 416, 418, 420, 421, 423, 424, 425, 426, 428, 429, 431, 432, 433, 434, 435, 436, 437, 438, 439, 440, 441, 442, 443, 444, 445, 446, 447, 449, 451, 453, 454, 456, 457, 458, 459, 460, 461, 462, 463, 465, 467, 468, 469, 470, 471, 472, 473, 474, 475, 476, 478, 480, 482, 484, 486, 488, 490, 492, 494, 496, 498, 500, 502, 504, 506, 508, 510, 512, 514, 516, 518, 520, 522, 524, 526, 528, 530, 532, 534, 535, 537, 539, 540, 542, 544, 545, 547, 549, 551, 553, 555, 557, 558,560, 562, 564, 568, 570, 572, 574, 576, 578, 579, 580, 581, 583, 585, 587, 589, 591, 593, 595, 597, 599, 601, 603, 605, 607, 608, 610, 612, 614, 616, 618, 620, 622, 624, 625, 627, 629, 631, 633, 635, 637, 639, 641, 643, 645, 647, 649, 650, 651, 652, 653, 654, 655, 656,657, 658, 660, 662, 664, 666, 668, 669, 670, 671, 672, 673, 674, 675, 676, 677, 679, 681, 683, 685, 686, 687, 689, 691, 693, 695, 696, 698, 699, 701, 702, 703, 704, 705, 706, 707, 709, 710, 711, 712, 713, 714, 715, 716, 717, 718, 719, 721, 722, 723, 724, 725, 726, 727, 728, 729, 730, 731, 732, 733, 734, 735, 736, 737, 738, 739, 740, 742, 744, 745, 746, 747, 749, 750, 752, 753, 754, 755, 757, 759, 760, 761, 762, 764, 765, 766, 767, 768, 769, 770, 771, and 772, and wherein a plant produced from the plant cell is tolerant of elevated soil levels of Al³⁺ as compared to that of a control plant that does not comprise the nucleic acid, and wherein the plant is not tolerant of elevated saline levels.

[0022] This document also features a transgenic plant comprising a plant cell described herein, progeny of the plants that have increased tolerance to elevated Al³⁺ conditions as compared to that of a control plant that does not comprise the nucleic acid, and wherein the progeny is not tolerant of elevated saline levels, seeds of the transgenic plants, and vegetative tissue of the transgenic plants, as well as food and feed products that include the vegetative tissue. The plant can be selected from the group consisting of Panicum virgatum, Sorghum bicolor, Miscanthus giganteus, Saccharum sp., Populus balsamifera, Zea mays, Glycine max, Brassica napus, Triticum aestivum, Gossypium hirsutum, Oryza sativa, Helianthus annuus, Medicago sativa, Beta vulgaris, or Pennisetum glaucum.

[0023] Unless otherwise defined, all technical and scientific terms used herein have the same meaning as commonly understood by one of ordinary skill in the art to which this invention pertains. Although methods and materials similar or equivalent to those described herein can be used to practice the invention, suitable methods and materials are described below. All publications, patent applications, patents, and other references mentioned herein are incorporated by reference in their entirety. In case of conflict, the present specification, including definitions, will control. In addition, the materials, methods, and examples are illustrative only and not intended to be limiting.

[0024] The details of one or more embodiments of the invention are set forth in the accompanying drawings and the description below. Other features, objects, and advantages of the invention will be apparent from the description and drawings, and from the claims. The word “comprising” in the claims may be replaced by “consisting essentially of” or with “consisting of,” according to standard practice in patent law.

### DESCRIPTION OF DRAWINGS

[0025] FIGS. 1A-1D contain an alignment of the amino acid sequence of CeresClone: 375578 (SEQ ID NO: 353) with homologous and/or orthologous amino acid sequences. In all the alignment figures shown herein, a dash in an aligned sequence represents a gap, i.e., a lack of an amino acid at that position. Identical amino acids or conserved amino acid substitutions among aligned sequences are identified by boxes.

[0026] FIG. 1 and the other alignment figures provided herein were generated using the program MUSCLE version 3.52.

[0027] FIGS. 2A-2C contain an alignment of the amino acid sequence of CeresClone:11684 (SEQ ID NO: 237) with homologous and/or orthologous amino acid sequences.

[0028] FIGS. 3A-3C contain an alignment of the amino acid sequence of CeresClone: 24255 (SEQ ID NO: 451) with homologous and/or orthologous amino acid sequences.

[0029] FIGS. 4A-4G contain an alignment of the amino acid sequence of CeresClone: 1752915 (SEQ ID NO: 2) with homologous and/or orthologous amino acid sequences.

[0030] FIG. 5 is a bar graph of whole plant weight (shoots plus roots) of either wild-type (WT) controls or transgenic switchgrass (Ceres Clone 375578) treated with either pH 7.26 water (pH7); pH 4.0 water (pH4); or pH 4.0 water with aluminum (˜11 g AlCl₃/Kg soil; ˜0.00621 μM Al³⁺) (AlpH4). Aluminum toxicity had little to no effect on plant weight of the transgenic plants in comparison to control.

### DETAILED DESCRIPTION

[0031] The invention features methods and materials related to modulating aluminum tolerance in plants. In some embodiments, the plants may also have, for example, modulated levels of lignin, modified root architecture, modified herbicide resistance, modified carotenoid biosynthesis, or modulated cell wall content. The methods described herein can include transforming a plant cell with a nucleic acid encoding an aluminum tolerance-modulating polypeptide, wherein expression of the polypeptide results in a modulated level of aluminum tolerance. Plant cells produced using such methods can be grown to produce plants having an increased tolerance to elevated levels of aluminum. Such plants can have increased plant yield in soil containing elevated levels of Al³⁺.

### I. DEFINITIONS

[0032] “Amino acid” refers to one of the twenty biologically occurring amino acids and to synthetic amino acids, including D/L optical isomers.

[0033] “Cell type-preferential promoter” or “tissue-preferential promoter” refers to a promoter that drives expression preferentially in a target cell type or tissue, respectively, but may also lead to some transcription in other cell types or tissues as well.

[0034] “Control plant” refers to a plant that does not contain the exogenous nucleic acid present in a transgenic plant of interest, but otherwise has the same or similar genetic background as such a transgenic plant. A suitable control plant can be a non-transgenic wild type plant, a non-transgenic segregant from a transformation experiment, or a transgenic plant that contains an exogenous nucleic acid other than the exogenous nucleic acid of interest.

[0035] “Domains” are groups of substantially contiguous amino acids in a polypeptide that can be used to characterize protein families and/or parts of proteins. Such domains have a “fingerprint” or “signature” that can comprise conserved primary sequence, secondary structure, and/or three-dimensional conformation. Generally, domains are correlated with specific in vitro and/or in vivo activities. A domain can have a length of from 10 amino acids to 400 amino acids, e.g., 10 to 50 amino acids, or 25 to 100 amino acids, or 35 to 65 amino acids, or 35 to 55 amino acids, or 45 to 60 amino acids, or 200 to 300 amino acids, or 300 to 400 amino acids.

[0036] “Down-regulation” refers to regulation that decreases production of expression products (mRNA, polypeptide, or both) relative to basal or native states.

[0037] “Exogenous” with respect to a nucleic acid indicates that the nucleic acid is part of a recombinant nucleic acid construct, or is not in its natural environment. For example, an exogenous nucleic acid can be a sequence from one species introduced into another species, i.e., a heterologous nucleic acid. Typically, such an exogenous nucleic acid is introduced into the other species via a recombinant nucleic acid construct. An exogenous nucleic acid can also be a sequence that is native to an organism and that has been reintroduced into cells of that organism. An exogenous nucleic acid that includes a native sequence can often be distinguished from the naturally occurring sequence by the presence of non-natural sequences linked to the exogenous nucleic acid, e.g., non-native regulatory sequences flanking a native sequence in a recombinant nucleic acid construct. In addition, stably transformed exogenous nucleic acids typically are integrated at positions other than the position where the native sequence is found. It will be appreciated that an exogenous nucleic acid may have been introduced into a progenitor and not into the cell under consideration. For example, a transgenic plant containing an exogenous nucleic acid can be the progeny of a cross between a stably transformed plant and a non-transgenic plant. Such progeny are considered to contain the exogenous nucleic acid.

[0038] “Expression” refers to the process of converting genetic information of a polynucleotide into RNA through transcription, which is catalyzed by an enzyme, RNA polymerase, and into protein, through translation of mRNA on ribosomes.

[0039] “Heterologous polypeptide” as used herein refers to a polypeptide that is not a naturally occurring polypeptide in a plant cell, e.g., a transgenic Panicum virgatum plant transformed with and expressing the coding sequence for a nitrogen transporter polypeptide from a Zea mays plant.

[0040] “Isolated nucleic acid” as used herein includes a naturally-occurring nucleic acid, provided one or both of the sequences immediately flanking that nucleic acid in its naturally-occurring genome is removed or absent. Thus, an isolated nucleic acid includes, without limitation, a nucleic acid that exists as a purified molecule or a nucleic acid molecule that is incorporated into a vector or a virus. A nucleic acid existing among hundreds to millions of other nucleic acids within, for example, cDNA libraries, genomic libraries, or gel slices containing a genomic DNA restriction digest, is not to be considered an isolated nucleic acid.

[0041] “Modulation” of the level of aluminum tolerance refers to the change in the level of the aluminum tolerance that is observed as a result of expression of, or transcription from, an exogenous nucleic acid in a plant cell and/or plant. The change in level is measured relative to the corresponding level in control plants. Aluminum tolerance can be assessed by measuring root growth and/or plant height of plants grown in acidified soils containing elevated levels of Al³⁺. The concentration of Al³⁺ considered to be elevated can be adjusted depending on the species being tested as plant species vary in their capacity to tolerate aluminum. For example, rice is more tolerant of aluminum than sorghum. As such, to determine increased tolerance to aluminum in rice, concentrations greater than 160 μM Al³⁺ can be used. In sorghum, concentrations of around 27 μM Al³⁺ can be used. For switchgrass, concentrations of around 600 μM can be used.

[0042] “Nucleic acid” and “polynucleotide” are used interchangeably herein, and refer to both RNA and DNA, including cDNA, genomic DNA, synthetic DNA, and DNA or RNA containing nucleic acid analogs. A nucleic acid can be double-stranded or single-stranded (i.e., a sense strand or an antisense strand). Non-limiting examples of polynucleotides include genes, gene fragments, exons, introns, messenger RNA (mRNA), transfer RNA, ribosomal RNA, siRNA, micro-RNA, ribozymes, cDNA, recombinant polynucleotides, branched polynucleotides, nucleic acid probes and nucleic acid primers. A polynucleotide may contain unconventional or modified nucleotides.

[0043] “Operably linked” refers to the positioning of a regulatory region and a sequence to be transcribed in a nucleic acid so that the regulatory region is effective for regulating transcription or translation of the sequence. For example, to operably link a coding sequence and a regulatory region, the translation initiation site of the translational reading frame of the coding sequence is typically positioned between one and about fifty nucleotides downstream of the regulatory region. A regulatory region can, however, be positioned as much as about 5,000 nucleotides upstream of the translation initiation site, or about 2,000 nucleotides upstream of the transcription start site.

[0044] “Polypeptide” as used herein refers to a compound of two or more subunit amino acids, amino acid analogs, or other peptidomimetics, regardless of post-translational modification, e.g., phosphorylation or glycosylation. The subunits may be linked by peptide bonds or other bonds such as, for example, ester or ether bonds. Full-length polypeptides, truncated polypeptides, point mutants, insertion mutants, splice variants, chimeric proteins, and fragments thereof are encompassed by this definition.

[0045] “Progeny” includes descendants of a particular plant or plant line. Progeny of an instant plant include seeds formed on F₁, F₂, F₃, F₄, F₅, F₆ and subsequent generation plants, or seeds formed on BC₁, BC₂, BC₃, and subsequent generation plants, or seeds formed on F₁BC₁, F₁BC₂, F₁BC₃, and subsequent generation plants. The designation F₁ refers to the progeny of a cross between two parents that are genetically distinct. The designations F₂, F₃, F₄, F₅ and F₆ refer to subsequent generations of self- or sib-pollinated progeny of an F₁ plant.

[0046] “Regulatory region” refers to a nucleic acid having nucleotide sequences that influence transcription or translation initiation and rate, and stability and/or mobility of a transcription or translation product. Regulatory regions include, without limitation, promoter sequences, enhancer sequences, response elements, protein recognition sites, inducible elements, protein binding sequences, 5′ and 3′ untranslated regions (UTRs), transcriptional start sites, termination sequences, polyadenylation sequences, introns, and combinations thereof. A regulatory region typically comprises at least a core (basal) promoter. A regulatory region also may include at least one control element, such as an enhancer sequence, an upstream element or an upstream activation region (UAR). For example, a suitable enhancer is a cis-regulatory element (−212 to −154) from the upstream region of the octopine synthase (ocs) gene. Fromm et al., The Plant Cell, 1:977-984 (1989).

[0047] “Up-regulation” refers to regulation that increases the level of an expression product (mRNA, polypeptide, or both) relative to basal or native states.

[0048] “Vector” refers to a replicon, such as a plasmid, phage, or cosmid, into which another DNA segment may be inserted so as to bring about the replication of the inserted segment. Generally, a vector is capable of replication when associated with the proper control elements. The term “vector” includes cloning and expression vectors, as well as viral vectors and integrating vectors. An “expression vector” is a vector that includes a regulatory region.

### II. POLYPEPTIDES

[0049] Polypeptides described herein include aluminum tolerance-modulating polypeptides. Aluminum tolerance-modulating polypeptides can be effective to modulate (e.g., increase) aluminum tolerance when expressed in a plant or plant cell. Such polypeptides typically contain at least one domain indicative of aluminum tolerance-modulating polypeptides, as described in more detail herein. Aluminum tolerance-modulating polypeptides typically have an HMM bit score that is greater than 65 as described in more detail herein. In some embodiments, aluminum tolerance-modulating polypeptides have greater than 80% identity to SEQ ID NOs: 2, 3, 4, 5, 7, 8, 9, 10, 11, 12, 13, 14, 15, 17, 19, 20, 22, 24, 26, 28, 29, 31, 32, 33, 35, 36, 38, 40, 41, 42, 43, 44, 45, 47, 48, 49, 50, 52, 54, 55, 56, 57, 58, 59, 61, 63, 64, 65, 66, 67, 69, 70, 72, 73, 75, 77, 78, 79, 81, 82, 83, 84, 85, 86, 87, 88, 89, 90, 91, 93, 94, 96, 97, 98, 99, 100, 102, 103, 104, 105, 106, 107, 108, 109, 110, 111, 113, 115, 117, 119, 120, 121, 122, 124, 125, 126, 127, 129, 131, 132, 134, 136, 137, 138, 140, 142, 144, 146, 147, 148, 149, 150, 151, 152, 153, 154, 155, 156, 158, 159, 160, 162, 163, 164, 166, 167, 169, 171, 172, 173, 174, 175, 176, 177, 178, 179, 180, 181, 182, 183, 184, 185, 186, 187, 188, 190, 191, 192, 193, 194, 195, 197, 198, 199, 200, 201, 202, 203, 205, 207, 209, 211, 212, 213, 214, 215, 216, 217, 218, 219, 220, 221, 223, 224, 225, 227, 228, 229, 230, 231, 232, 233, 234, 235, 237, 239, 241, 243, 245, 246, 248, 250, 251, 253, 255, 257, 258, 259, 261, 263, 265, 267, 269, 271, 273, 274, 276, 278, 280, 281, 283, 284, 285, 287, 288, 290, 292, 293, 294, 296, 298, 300, 302, 304, 306, 308, 310, 312, 314, 316, 318, 320, 322, 324, 326, 328, 329, 331, 333, 335, 337, 338, 339, 341, 342, 343, 344, 345, 346, 347, 348, 349, 350, 351, 353, 355, 357, 358, 360, 362, 364, 366, 368, 369, 371, 373, 375, 376, 377, 378, 379, 380, 382, 384, 386, 388, 390, 392, 393, 395, 396, 397, 398, 399, 400, 401, 402, 404, 405, 407, 409, 411, 413, 414, 416, 418, 420, 421, 423, 424, 425, 426, 428, 429, 431, 432, 433, 434, 435, 436, 437, 438, 439, 440, 441, 442, 443, 444, 445, 446, 447, 449, 451, 453, 454, 456, 457, 458, 459, 460, 461, 462, 463, 465, 467, 468, 469, 470, 471, 472, 473, 474, 475, 476, 478, 480, 482, 484, 486, 488, 490, 492, 494, 496, 498, 500, 502, 504, 506, 508, 510, 512, 514, 516, 518, 520, 522, 524, 526, 528, 530, 532, 534, 535, 537, 539, 540, 542, 544, 545, 547, 549, 551, 553, 555, 557, 558,560, 562, 564, 568, 570, 572, 574, 576, 578, 579, 580, 581, 583, 585, 587, 589, 591, 593, 595, 597, 599, 601, 603, 605, 607, 608, 610, 612, 614, 616, 618, 620, 622, 624, 625, 627, 629, 631, 633, 635, 637, 639, 641, 643, 645, 647, 649, 650, 651, 652, 653, 654, 655, 656,657, 658, 660, 662, 664, 666, 668, 669, 670, 671, 672, 673, 674, 675, 676, 677, 679, 681, 683, 685, 686, 687, 689, 691, 693, 695, 696, 698, 699, 701, 702, 703, 704, 705, 706, 707, 709, 710, 711, 712, 713, 714, 715, 716, 717, 718, 719, 721, 722, 723, 724, 725, 726, 727, 728, 729, 730, 731, 732, 733, 734, 735, 736, 737, 738, 739, 740, 742, 744, 745, 746, 747, 749, 750, 752, 753, 754, 755, 757, 759, 760, 761, 762, 764, 765, 766, 767, 768, 769,770, 771, or 772 as described in more detail herein.

[0050] A. Domains Indicative of Aluminum Tolerance-Modulating Polypeptides

[0051] An aluminum tolerance-modulating polypeptide can contain a NAC domain, which is predicted to be characteristic of an aluminum tolerance modulating polypeptide. SEQ ID NO: 2 sets forth the amino acid sequence of a Panicum virgatum clone, identified herein as CeresClone: 1752915 (SEQ ID NO:1), that is predicted to contain a NAC protein domain. For example, an aluminum tolerance-modulating polypeptide can comprise a NAC protein domain having 60 percent or greater (e.g., 65, 70, 75, 80, 85, 90, 95, 97, 98, 99, or 100%) sequence identity to residues 14 to 139 of SEQ ID NO: 2. In some embodiments, an aluminum tolerance-modulating polypeptide can comprise a NAC protein domain having 60 percent or greater (e.g., 65, 70, 75, 80, 85, 90, 95, 97, 98, 99, or 100%) sequence identity to the NAC protein domain of one or more of the polypeptides set forth in SEQ ID NOs: 3, 4, 5, 7, 8, 9, 10, 11, 12, 13, 14, 15, 17, 19, 20, 22, 24, 26, 28, 29, 31, 32, 33, 35, 36, 38, 40, 41, 42, 43, 44, 45, 47, 48, 49, 50, 52, 54, 55, 56, 57, 58, 59, 61, 63, 64, 65, 66, 67, 69, 70, 72, 73, 75, 77, 78, 79, 81, 82, 83, 84, 85, 86, 87, 88, 89, 90, 91, 93, 94, 96, 97, 98, 99, 100, 102, 103, 104, 105, 106, 107, 108, 109, 110, 111, 113, 115, 117, 119, 120, 121, 122, 124, 125, 126, 127, 129, 131, 132, 134, 136, 137, 138, 140, 142, 144, 146, 147, 148, 149, 150, 151, 152, 153, 154, 155, 156, 158, 159, 160, 162, 163, 164, 166, 167, 169, 171, 172, 173, 174, 175, 176, 177, 178, 179, 180, 181, 182, 183, 184, 185, 186, 187, 188, 190, 191, 192, 193, 194, 195, 197, 198, 199, 200, 201, 202, 203, 205, 207, 209, 211, 212, 213, 214, 215, 216, 217, 218, 219, 220, 221, 223, 224, 225, 227, 228, 229, 230, 231, 232, 233, 234, and 235. The NAC protein domains of such sequences are set forth in the Sequence Listing. The NAC domain (about 160 amino acids) was identified from the No apical meristem (NAM) protein domain, ATF1-2, and CUC2 (Cup-Shaped Cotyledon). See Ooka et al. 2003, DNA Res. 20: 239-247; Fang et al. 2008, Mol. Genet. Genomics 280: 547-563). The NAM protein domain is characteristic of plant development proteins. NAM proteins have a role in determining positions of meristems and primordial. Mutations in NAM result in the failure to develop a shoot apical meristem in petunia embryos. See, e.g., Souer, et al., Cell 85:159-170 (1996).

[0052] An aluminum tolerance-modulating polypeptide can contain an AN1-like Zinc finger domain and an A20-like zinc finger domain, which are predicted to be characteristic of an aluminum tolerance-modulating polypeptide. For example, SEQ ID NO: 237 sets forth the amino acid sequence of an Arabidopsis thaliana clone, identified herein as CeresClone: 11684 (SEQ ID NO: 236), that is predicted to contain AN1-like and A20-like zinc finger domains. For example, an aluminum tolerance-modulating polypeptide can comprise an AN1-like Zinc finger domain having 60 percent or greater (e.g., 65, 70, 75, 80, 85, 90, 95, 97, 98, 99, or 100%) sequence identity to residues 101 to 140 of SEQ ID NO: 237 and can comprise an A20-like Zinc finger domain having 60 percent or greater (e.g., 65, 70, 75, 80, 85, 90, 95, 97, 98, 99, or 100%) sequence identity to residues 25 to 47 of SEQ ID NO: 237. In some embodiments, an aluminum tolerance-modulating polypeptide can comprise an AN1-like Zinc finger domain and an A20-like zinc finger domain having 60 percent or greater (e.g., 65, 70, 75, 80, 85, 90, 95, 97, 98, 99, or 100%) sequence identity to the AN1-like and A20-like zinc finger domains of one or more of the polypeptides set forth in SEQ ID NOs: 239, 241, 243, 245, 246, 248, 250, 251, 253, 255, 257, 258, 259, 261, 263, 265, 267, 269, 271, 273, 274, 276, 278, 280, 281, 283, 284, 285, 287, 288, 290, 292, 293, 294, 296, 298, 300, 302, 304, 306, 308, 310, 312, 314, 316, 318, 320, 322, 324, 326, 328, 329, 331, 333, 335, 337, 338, 339, 341, 342, 343, 344, 345, 346, 347, 348, 349, 350, and 351. The AN1-like and A20-like zinc finger domains of such sequences are set forth in the Sequence Listing. The AN1-like zinc finger domain is a dimetal (zinc)-bound alpha/beta fold, with six conserved cysteines and two histidines that can coordinate 2 zinc atoms. The A20-like zinc finger domain can be a ubiquitin binding domain that mediates self-association. Stress-associated proteins (SAPs) can have an AN1-like zinc finger domain and an A20-like zinc finger domain. See, e.g., Vij and Tyag, Mol Genet Genomics, 276(6):565-75 (2006).

[0053] SEQ ID NO: 451 sets forth the amino acid sequence of an Arabidopsis thaliana clone, identified herein as CeresClone: 24255 (SEQ ID NO: 450), that also is predicted to contain AN1-like and A20-like zinc finger domains. For example, an aluminum tolerance-modulating polypeptide can comprise an AN1-like Zinc finger domain having 60 percent or greater (e.g., 65, 70, 75, 80, 85, 90, 95, 97, 98, 99, or 100%) sequence identity to residues 102 to 141 of SEQ ID NO: 451 and can comprise an A20-like Zinc finger domain having 60 percent or greater (e.g., 65, 70, 75, 80, 85, 90, 95, 97, 98, 99, or 100%) sequence identity to residues 14 to 36 of SEQ ID NO: 451. In some embodiments, an aluminum tolerance-modulating polypeptide can comprise an AN1-like Zinc finger domain and an A20-like zinc finger domain having 60 percent or greater (e.g., 65, 70, 75, 80, 85, 90, 95, 97, 98, 99, or 100%) sequence identity to the AN1-like and A20-like zinc finger domains of one or more of the polypeptides set forth in SEQ ID NOs: 453, 454, 456, 457, 458, 459, 460, 461, 462, 463, 465, 467, 468, 469, 470, 471, 472, 473, 474, 475, 476, 478, 480, 482, 484, 486, 488, 490, 492, 494, 496, 498, 500, 502, 504, 506, 508, 510, 512, 514, 516, 518, 520, 522, 524, 526, 528, 530, 532, 534, 535, 537, 539, 540, 542, 544, 545, 547, 549, 551, 553, 555, 557, 558,560, 562, 564, 568, 570, 572, 574, 576, 578, 579, 580, 581, 583, 585, 587, 589, 591, 593, 595, 597, 599, 601, 603, 605, 607, 608, 610, 612, 614, 616, 618, 620, 622, 624, 625, 627, 629, 631, 633, 635, 637, 639, 641, 643, 645, 647, 649, 650, 651, 652, 653, 654, 655, 656,657, 658, 660, 662, 664, 666, 668, 669, 670, 671, 672, 673, 674, 675, 676, 677, 679, 681, 683, 685, 686, 687, 689, 691, 693, 695, 696, 698, 699, 701, 702, 703, 704, 705, 706, 707, 709, 710, 711, 712, 713, 714, 715, 716, 717, 718, 719, 721, 722, 723, 724, 725, 726, 727, 728, 729, 730, 731, 732, 733, 734, 735, 736, 737, 738, 739, 740, 742, 744, 745, 746, 747, 749, 750, 752, 753, 754, 755, 757, 759, 760, 761, 762, 764, 765, 766, 767, 768, 769,770, 771, and 772.

[0054] An aluminum tolerance-modulating polypeptide can contain an IQ domain, which is predicted to be characteristic of an aluminum tolerance-modulating polypeptide. SEQ ID NO: 353 sets forth the amino acid sequence of a Zea mays clone, identified herein as CeresClone: 375578 (SEQ ID NO: 352), that is predicted to contain an IQ domain. For example, an aluminum tolerance-modulating polypeptide can comprise an IQ domain having 60 percent or greater (e.g., 65, 70, 75, 80, 85, 90, 95, 97, 98, 99, or 100%) sequence identity to residues 139 to 157 of SEQ ID NO: 353. In some embodiments, an aluminum tolerance-modulating polypeptide can comprise an IQ domain having 60 percent or greater (e.g., 65, 70, 75, 80, 85, 90, 95, 97, 98, 99, or 100%) sequence identity to the IQ domain of one or more of the polypeptides set forth in SEQ ID NOs: 355, 357, 358, 360, 362, 364, 366, 368, 369, 371, 373, 375, 376, 377, 378, 379, 380, 382, 384, 386, 388, 390, 392, 393, 395, 396, 397, 398, 399, 400, 401, 402, 404, 405, 407, 409, 411, 413, 414, 416, 418, 420, 421, 423, 424, 425, 426, 428, 429, 431, 432, 433, 434, 435, 436, 437, 438, 439, 440, 441, 442, 443, 444, 445, 446, 447, and 449. The IQ domain is a consensus for calcium-independent binding of calmodulin, which is a calcium sensor and helps regulate events through its interaction with a diverse group of cellular proteins. See Rhoads and Friedberg, FASEB J., 11(5):331-40 (1997).

[0055] In some embodiments, an aluminum tolerance-modulating polypeptide is truncated at the amino- or carboxy-terminal end of a naturally occurring polypeptide. A truncated polypeptide may retain certain domains of the naturally occurring polypeptide while lacking others. Thus, length variants that are up to 5 amino acids shorter or longer typically exhibit the aluminum tolerance-modulating activity of a truncated polypeptide. In some embodiments, a truncated polypeptide is a dominant negative polypeptide. Expression in a plant of such a truncated polypeptide confers a difference in the level of aluminum tolerance of a plant as compared to the corresponding level of a control plant that does not comprise the truncation.

[0056] B. Functional Homologs Identified by Reciprocal BLAST

[0057] In some embodiments, one or more functional homologs of a reference aluminum tolerance-modulating polypeptide defined by one or more of the Pfam descriptions indicated above are suitable for use as aluminum tolerance-modulating polypeptides. A functional homolog is a polypeptide that has sequence similarity to a reference polypeptide, and that carries out one or more of the biochemical or physiological function(s) of the reference polypeptide. A functional homolog and the reference polypeptide may be natural occurring polypeptides, and the sequence similarity may be due to convergent or divergent evolutionary events. As such, functional homologs are sometimes designated in the literature as homologs, or orthologs, or paralogs. Variants of a naturally occurring functional homolog, such as polypeptides encoded by mutants of a wild type coding sequence, may themselves be functional homologs. Functional homologs can also be created via site-directed mutagenesis of the coding sequence for an aluminum tolerance-modulating polypeptide, or by combining domains from the coding sequences for different naturally-occurring aluminum tolerance-modulating polypeptides (“domain swapping”). The term “functional homolog” is sometimes applied to the nucleic acid that encodes a functionally homologous polypeptide.

[0058] Functional homologs can be identified by analysis of nucleotide and polypeptide sequence alignments. For example, performing a query on a database of nucleotide or polypeptide sequences can identify homologs of aluminum tolerance-modulating polypeptides. Sequence analysis can involve BLAST, Reciprocal BLAST, or PSI-BLAST analysis of nonredundant databases using an aluminum tolerance-modulating polypeptide amino acid sequence as the reference sequence. Amino acid sequence is, in some instances, deduced from the nucleotide sequence. Those polypeptides in the database that have greater than 40% sequence identity are candidates for further evaluation for suitability as an aluminum tolerance-modulating polypeptide. Amino acid sequence similarity allows for conservative amino acid substitutions, such as substitution of one hydrophobic residue for another or substitution of one polar residue for another. If desired, manual inspection of such candidates can be carried out in order to narrow the number of candidates to be further evaluated. Manual inspection can be performed by selecting those candidates that appear to have domains present in aluminum tolerance-modulating polypeptides, e.g., conserved functional domains.

[0059] Conserved regions can be identified by locating a region within the primary amino acid sequence of an aluminum tolerance-modulating polypeptide that is a repeated sequence, forms some secondary structure (e.g., helices and beta sheets), establishes positively or negatively charged domains, or represents a protein motif or domain. See, e.g., the Pfam web site describing consensus sequences for a variety of protein motifs and domains on the World Wide Web at sanger.ac.uk/Software/Pfam/ and pfam.janelia.org/. A description of the information included at the Pfam database is described in Sonnhammer et al., Nucl. Acids Res., 26:320-322 (1998); Sonnhammer et al., Proteins, 28:405-420 (1997); and Bateman et al., Nucl. Acids Res., 27:260-262 (1999). Conserved regions also can be determined by aligning sequences of the same or related polypeptides from closely related species. Closely related species preferably are from the same family. In some embodiments, alignment of sequences from two different species is adequate.

[0060] Typically, polypeptides that exhibit at least about 40% amino acid sequence identity are useful to identify conserved regions. Conserved regions of related polypeptides exhibit at least 45% amino acid sequence identity (e.g., at least 50%, at least 60%, at least 70%, at least 80%, or at least 90% amino acid sequence identity). In some embodiments, a conserved region exhibits at least 92%, 94%, 96%, 98%, or 99% amino acid sequence identity.

[0061] Examples of amino acid sequences of functional homologs of the polypeptide set forth in SEQ ID NO: 353 are provided in FIG. 1 and in the Sequence Listing. Such functional homologs include, for example, CeresClone_106263 (SEQ ID NO: 355), CeresClone_335348 (SEQ ID NO: 357), GI_115440873 (SEQ ID NO: 358), CeresClone_826796 (SEQ ID NO: 360), CeresAnnot_1465047 (SEQ ID NO: 362), CeresClone_1919901 (SEQ ID NO: 364), SEEDLINE:ME02064_CeresClone_375578_mutated (SEQ ID NO: 366), CeresClone_520008 (SEQ ID NO: 368), GI_7413581 (SEQ ID NO: 369), CeresClone 228069 (SEQ ID NO: 371), CeresClone_467508 (SEQ ID NO: 373), CeresClone_1829581 (SEQ ID NO: 375), GI_125550655 (SEQ ID NO: 376), GI_15231175 (SEQ ID NO: 377), GI_145357576 (SEQ ID NO: 378), GI_125528277 (SEQ ID NO: 379), GI_224032591 (SEQ ID NO: 380), CeresAnnot_8669409 (SEQ ID NO: 382), CeresClone_1901601 (SEQ ID NO: 384), CeresClone_2034697 (SEQ ID NO: 386), CeresClone_1747444 (SEQ ID NO: 388), CeresClone_1998974 (SEQ ID NO: 390), CeresClone_1883040 (SEQ ID NO: 392), GI_326520123 (SEQ ID NO: 393), CeresClone_101697218 (SEQ ID NO: 395), GI_215701453 (SEQ ID NO: 396), GI_225449126 (SEQ ID NO: 397), GI_147809623 (SEQ ID NO: 398), GI_224109704 (SEQ ID NO: 399), GI_225439898 (SEQ ID NO: 400), GI_218196002 (SEQ ID NO: 401), GI_54306075 (SEQ ID NO: 402), CeresAnnot_1484880 (SEQ ID NO: 404), GI_224028605 (SEQ ID NO: 405), CeresAnnot_1528800 (SEQ ID NO: 407), CeresClone_1792902 (SEQ ID NO: 409), CeresClone_1806867 (SEQ ID NO: 411), CeresClone_1727738 (SEQ ID NO: 413), GI_238007500 (SEQ ID NO: 414), CeresAnnot_8724651 (SEQ ID NO: 416), CeresClone_1897134 (SEQ ID NO: 418), CeresClone_1859266 (SEQ ID NO: 420), GI_194696788 (SEQ ID NO: 421), CeresAnnot 1475350 (SEQ ID NO: 423), GI_326490361 (SEQ ID NO: 424), GI_224140165 (SEQ ID NO: 425), GI_255577665 (SEQ ID NO: 426), CeresClone_1886384 (SEQ ID NO: 428), GI_255568402 (SEQ ID NO: 429), CeresClone_1942871 (SEQ ID NO: 431), GI_326527367 (SEQ ID NO: 432), GI_297816500 (SEQ ID NO: 433), GI_297810377 (SEQ ID NO: 434), GI_302762472 (SEQ ID NO: 435), GI_302815615 (SEQ ID NO: 436), GI_326525172 (SEQ ID NO: 437), GI_116787496 (SEQ ID NO: 438), GI_224029961 (SEQ ID NO: 439), GI_312282973 (SEQ ID NO: 440), GI_15232741 (SEQ ID NO: 441), GI_302806862 (SEQ ID NO: 442), GI_302772817 (SEQ ID NO: 443), GI_240254538 (SEQ ID NO: 444), GI_297833734 (SEQ ID NO: 445), GI_2739366 (SEQ ID NO: 446), GI_297825811 (SEQ ID NO: 447), and CeresClone_229668 (SEQ ID NO: 449). In some cases, a functional homolog of SEQ ID NO: 353 has an amino acid sequence with at least 45% sequence identity, e.g., 50%, 52%, 56%, 59%, 61%, 65%, 70%, 75%, 80%, 85%, 90%, 95%, 97%, 98%, or 99% sequence identity, to the amino acid sequence set forth in SEQ ID NO: 353. In some cases, a functional homolog of SEQ ID NO: 353 has an amino acid sequence with at least 45% sequence identity, e.g., 50%, 52%, 56%, 59%, 61%, 65%, 70%, 75%, 80%, 85%, 90%, 95%, 97%, 98%, or 99% sequence identity, to one or more functional homologs of SEQ ID NO: 353 described above or set forth in the Sequence Listing. The polypeptide set forth in SEQ ID NO: 353, or the functional homologs set forth above or in the Sequence Listing, can be truncated at the N- or C-terminus. In one embodiment, a functional homolog of SEQ ID NO:353 contains an N-terminal truncation. For example, a functional homolog of SEQ ID NO: 353 such as SEQ ID NO:366 can include amino acids aligning with residues 188 to 498 of SEQ ID NO: 353.

[0062] Examples of amino acid sequences of functional homologs of the polypeptide set forth in SEQ ID NO: 237 are provided in FIG. 2 and in the Sequence Listing. Such functional homologs include, for example, CeresClone_1847516 (SEQ ID NO: 239), CeresAnnot_8714481 (SEQ ID NO: 241), CeresClone_1961986 (SEQ ID NO: 243), CeresClone_1464596 (SEQ ID NO: 245), GI_225450173 (SEQ ID NO: 246), CeresClone_532446 (SEQ ID NO: 248), CeresAnnot_1493109 (SEQ ID NO: 250), GI_88866527 (SEQ ID NO: 251), CeresClone_1609861 (SEQ ID NO: 253), CeresClone_1620215 (SEQ ID NO: 255), CeresClone_1732772 (SEQ ID NO: 257), GI_295148935 (SEQ ID NO: 258), GI_125606142 (SEQ ID NO: 259), CeresClone_1040399 (SEQ ID NO: 261), CeresClone_1093691 (SEQ ID NO: 263), CeresClone_974539 (SEQ ID NO: 265), CeresClone_1832340 (SEQ ID NO: 267), CeresClone_1933211 (SEQ ID NO: 269), CeresClone_997558 (SEQ ID NO: 271), CeresAnnot_6041596 (SEQ ID NO: 273), GI_125564176 (SEQ ID NO: 274), CeresClone_1836064 (SEQ ID NO: 276), CeresClone_1909693 (SEQ ID NO: 278), CeresClone_1765346 (SEQ ID NO: 280), GI_125546008 (SEQ ID NO: 281), CeresClone_1950900 (SEQ ID NO: 283), GI_41350259 (SEQ ID NO: 284), GI_125588210 (SEQ ID NO: 285), CeresClone_1954395 (SEQ ID NO: 287), GI_18403408 (SEQ ID NO: 288), CeresClone_2010121 (SEQ ID NO: 290), CeresAnnot_6011486 (SEQ ID NO: 292), GI_25082726 (SEQ ID NO: 293), GI_113196593 (SEQ ID NO: 294), CeresClone_1843021 (SEQ ID NO: 296), CeresClone_1931194 (SEQ ID NO: 298), CeresClone_1850070 (SEQ ID NO: 300), CeresAnnot_6034955 (SEQ ID NO: 302), CeresAnnot 6119444 (SEQ ID NO: 304), CeresAnnot_6063956 (SEQ ID NO: 306), CeresAnnot_6015461 (SEQ ID NO: 308), CeresClone_696244 (SEQ ID NO: 310), CeresAnnot_1468973 (SEQ ID NO: 312), CeresClone_2019529 (SEQ ID NO: 314), CeresClone_1492169 (SEQ ID NO: 316), CeresClone_1652996 (SEQ ID NO: 318), CeresClone_100861292 (SEQ ID NO: 320), CeresClone_1875452 (SEQ ID NO: 322), CeresClone_296366 (SEQ ID NO: 324), CeresClone_1468822 (SEQ ID NO: 326), CeresClone_1793946 (SEQ ID NO: 328), GI_297829802 (SEQ ID NO: 329), CeresClone_1094610 (SEQ ID NO: 331), CeresClone_1084216 (SEQ ID NO: 333), CeresClone_100041169 (SEQ ID NO: 335), CeresClone_1619774 (SEQ ID NO: 337), GI_218685692 (SEQ ID NO: 338), GI_295148937 (SEQ ID NO: 339), CeresClone_1783953 (SEQ ID NO: 341), GI_242045152 (SEQ ID NO: 342), GI_223972713 (SEQ ID NO: 343), GI_326494504 (SEQ ID NO: 344), GI_326515226 (SEQ ID NO: 345), GI_163838754 (SEQ ID NO: 346), GI_163838756 (SEQ ID NO: 347), GI_163838762 (SEQ ID NO: 348), GI_326523409 (SEQ ID NO: 349), GI_255544230 (SEQ ID NO: 350), and GI_222822669 (SEQ ID NO: 351). In some cases, a functional homolog of SEQ ID NO: 237 has an amino acid sequence with at least 45% sequence identity, e.g., 50%, 52%, 56%, 59%, 61%, 65%, 70%, 75%, 80%, 85%, 90%, 95%, 97%, 98%, or 99% sequence identity, to the amino acid sequence set forth in SEQ ID NO: 237. In some cases, a functional homolog of SEQ ID NO: 237 has an amino acid sequence with at least 45% sequence identity, e.g., 50%, 52%, 56%, 9%, 61%, 65%, 70%, 75%, 80%, 85%, 90%, 95%, 97%, 98%, or 99% sequence identity, to one or more functional homologs of SEQ ID NO: 237 described above or set forth in the Sequence Listing.

[0063] Examples of amino acid sequences of functional homologs of the polypeptide set forth in SEQ ID NO: 451 are provided in FIG. 3 and in the Sequence Listing. Such functional homologs include, for example, CeresClone_1931889 (SEQ ID NO: 453), GI_225440926 (SEQ ID NO: 454), CeresClone_708446 (SEQ ID NO: 456), GI_255575635 (SEQ ID NO: 457), GI_193237563 (SEQ ID NO: 458), GI_222822693 (SEQ ID NO: 459), GI_224103059 (SEQ ID NO: 460), GI_302398693 (SEQ ID NO: 461), GI 222822667 (SEQ ID NO: 462), GI_116778998 (SEQ ID NO: 463), CeresClone_1748922 (SEQ ID NO: 465), CeresClone_1775820 (SEQ ID NO: 467), GI_115468934 (SEQ ID NO: 468), GI_118424243 (SEQ ID NO: 469), GI_147783026 (SEQ ID NO: 470), GI_119367488 (SEQ ID NO: 471), GI_147860340 (SEQ ID NO: 472), GI_147792975 (SEQ ID NO: 473), GI_21359918 (SEQ ID NO: 474), GI_73951300 (SEQ ID NO: 475), GI_115477170 (SEQ ID NO: 476), CeresClone_1798756 (SEQ ID NO: 478), CeresClone_1918424 (SEQ ID NO: 480), CeresClone_1929645 (SEQ ID NO: 482), CeresClone_1845154 (SEQ ID NO: 484), CeresClone_1840507 (SEQ ID NO: 486), CeresClone_1853430 (SEQ ID NO: 488), CeresClone_1853189 (SEQ ID NO: 490), CeresClone_1808578 (SEQ ID NO: 492), CeresClone_1857508 (SEQ ID NO: 494), CeresClone_1946245 (SEQ ID NO: 496), CeresClone_1974721 (SEQ ID NO: 498), CeresClone_1940441 (SEQ ID NO: 500), CeresClone_1834813 (SEQ ID NO: 502), CeresClone_1848383 (SEQ ID NO: 504), CeresClone_1895219 (SEQ ID NO: 506), CeresClone_1866608 (SEQ ID NO: 508), CeresAnnot_1481252 (SEQ ID NO: 510), CeresAnnot_1474904 (SEQ ID NO: 512), CeresAnnot_1450673 (SEQ ID NO: 514), CeresAnnot_1437933 (SEQ ID NO: 516), CeresAnnot_1448174 (SEQ ID NO: 518), CeresAnnot 1447323 (SEQ ID NO: 520), CeresAnnot_1456578 (SEQ ID NO: 522), CeresAnnot_1491680 (SEQ ID NO: 524), CeresAnnot_1438851 (SEQ ID NO: 526), CeresAnnot_1440235 (SEQ ID NO: 528), CeresAnnot_1461453 (SEQ ID NO: 530), CeresAnnot_1468974 (SEQ ID NO: 532), CeresAnnot_1474244 (SEQ ID NO: 534), GI_15231686 (SEQ ID NO: 535), CeresClone_5522 (SEQ ID NO: 537), CeresClone_30543 (SEQ ID NO: 539), GI_14596167 (SEQ ID NO: 540), CeresClone_14203 (SEQ ID NO: 542), CeresClone_13832 (SEQ ID NO: 544), GI_15221329 (SEQ ID NO: 545), CeresClone_975913 (SEQ ID NO: 547), CeresClone_967417 (SEQ ID NO: 549), CeresClone_974951 (SEQ ID NO: 551), CeresClone_958471 (SEQ ID NO: 553), CeresClone_979956 (SEQ ID NO: 555), CeresClone_962327 (SEQ ID NO: 557), GI_119720772 (SEQ ID NO: 558), CeresClone_1614593 (SEQ ID NO: 560), CeresClone_567184 (SEQ ID NO: 562), CeresClone_580467 (SEQ ID NO: 564), CeresClone_1021029 (SEQ ID NO: 568), CeresClone_1072112 (SEQ ID NO: 570), CeresClone 481246 (SEQ ID NO: 572), CeresClone_1242573 (SEQ ID NO: 574), CeresClone 537439 (SEQ ID NO: 576), CeresClone_547126 (SEQ ID NO: 578), GI_92896423 (SEQ ID NO: 579), GI_124360119 (SEQ ID NO: 580), GI_122069751 (SEQ ID NO: 581), CeresClone_1030374 (SEQ ID NO: 583), CeresClone_1030540 (SEQ ID NO: 585), CeresClone_634261 (SEQ ID NO: 587), CeresClone_696374 (SEQ ID NO: 589), CeresClone_698573 (SEQ ID NO: 591), CeresClone_701370 (SEQ ID NO: 593), CeresClone_893059 (SEQ ID NO: 595), CeresClone_757664 (SEQ ID NO: 597), CeresClone_1387149 (SEQ ID NO: 599), CeresClone_1411371 (SEQ ID NO: 601), CeresClone_1380920 (SEQ ID NO: 603), CeresClone_1360570 (SEQ ID NO: 605), CeresClone_1458498 (SEQ ID NO: 607), GI_60202503 (SEQ ID NO: 608), CeresClone_1554153 (SEQ ID NO: 610), CeresClone_1362320 (SEQ ID NO: 612), CeresClone_1545291 (SEQ ID NO: 614), CeresClone_1589047 (SEQ ID NO: 616), CeresP Clone_101142707 (SEQ ID NO: 618), CeresClone_1433926 (SEQ ID NO: 620), CeresClone_1734621 (SEQ ID NO: 622), CeresClone_1731531 (SEQ ID NO: 624), GI_5031281 (SEQ ID NO: 625), CeresClone_1911017 (SEQ ID NO: 627), CeresClone_1955228 (SEQ ID NO: 629), CeresClone_1867313 (SEQ ID NO: 631), CeresClone_1955668 (SEQ ID NO: 633), CeresClone_1765871 (SEQ ID NO: 635), CeresClone_1870976 (SEQ ID NO: 637), CeresClone_1990071 (SEQ ID NO: 639), CeresClone_1965620 (SEQ ID NO: 641), CeresClone_1995041 (SEQ ID NO: 643), CeresClone_2015820 (SEQ ID NO: 645), CeresClone_1724157 (SEQ ID NO: 647), CeresClone_1724165 (SEQ ID NO: 649), GI_35187687 (SEQ ID NO: 650), GI_125556051 (SEQ ID NO: 651), GI_125561658 (SEQ ID NO: 652), GI_115470773 (SEQ ID NO: 653), GI_115444813 (SEQ ID NO: 654), GI_115446479 (SEQ ID NO: 655), GI_115455855 (SEQ ID NO: 656), GI_115479855 (SEQ ID NO: 657), GI_57899571 (SEQ ID NO: 658), CeresAnnot_6035031 (SEQ ID NO: 660), CeresAnnot_6111586 (SEQ ID NO: 662), CeresAnnot_6011488 (SEQ ID NO: 664), CeresAnnot_6063958 (SEQ ID NO: 666), CeresAnnot_6063957 (SEQ ID NO: 668), GI_38016527_Gossypium_barbadense (SEQ ID NO: 669), GI_75133829_Oryza_sativa (SEQ ID NO: 670), GI_125546011_Oryza_sativa_indica (SEQ ID NO: 671), GI_116778802_Picea (SEQ ID NO: 672), GI_116778893_Picea (SEQ ID NO: 673), GI_157849766_Brassica_rapa (SEQ ID NO: 674), GI_159474166_Chlamydomonas_reinhardtii (SEQ ID NO: 675), GI_168036656_Physcomitrella_patens (SEQ ID NO: 676), GI_168053490_Physcomitrella_patens (SEQ ID NO: 677), CeresClone_100879386_Zea_mays (SEQ ID NO: 679), CeresClone_1738028_Musa_acuminata (SEQ ID NO: 681), CeresClone_2055733_Miscanthus (SEQ ID NO: 683), CeresClone_2056478_Miscanthus (SEQ ID NO: 685), GI_297823437 (SEQ ID NO: 686), GI_297816570 (SEQ ID NO: 687), CeresClone_1428270 (SEQ ID NO: 689), CeresClone_1447811 (SEQ ID NO: 691), CeresClone_1093477 (SEQ ID NO: 693), CeresClone_1260056 (SEQ ID NO: 695), GI_255565591 (SEQ ID NO: 696), CeresClone_1626661 (SEQ ID NO: 698), GI_222822665 (SEQ ID NO: 699), CeresClone_1842119 (SEQ ID NO: 701), GI_222822659 (SEQ ID NO: 702), GI_222822691 (SEQ ID NO: 703), GI_255544810 (SEQ ID NO: 704), GI_297847482 (SEQ ID NO: 705), GI_116791002 (SEQ ID NO: 706), GI_297809513 (SEQ ID NO: 707), CeresClone_100049493 (SEQ ID NO: 709), GI_222822685 (SEQ ID NO: 710), GI_301133546 (SEQ ID NO: 711), GI_225426659 (SEQ ID NO: 712), GI_297799728 (SEQ ID NO: 713), GI_15234402 (SEQ ID NO: 714), GI_254030287 (SEQ ID NO: 715), GI_222423788 (SEQ ID NO: 716), GI_222822679 (SEQ ID NO: 717), GI_222822653 (SEQ ID NO: 718), GI_302787300 (SEQ ID NO: 719), CeresClone_1955772 (SEQ ID NO: 721), GI_222822655 (SEQ ID NO: 722), GI_225435496 (SEQ ID NO: 723), GI_15235819 (SEQ ID NO: 724), GI_212275744 (SEQ ID NO: 725), GI_116787141 (SEQ ID NO: 726), GI_238575930 (SEQ ID NO: 727), GI_326515250 (SEQ ID NO: 728), GI_217075260 (SEQ ID NO: 729), GI_222622367 (SEQ ID NO: 730), GI_222822681 (SEQ ID NO: 731), GI_194692334 (SEQ ID NO: 732), GI_116791662 (SEQ ID NO: 733), GI_168007673 (SEQ ID NO: 734), GI_222822687 (SEQ ID NO: 735), GI_326499404 (SEQ ID NO: 736), GI_255628951 (SEQ ID NO: 737), GI_326496248 (SEQ ID NO: 738), GI_297849616 (SEQ ID NO: 739), GI_326489039 (SEQ ID NO: 740), CeresAnnot_8672029 (SEQ ID NO: 742), CeresClone_24253 (SEQ ID NO: 744), GI_297739707 (SEQ ID NO: 745), GI_217075452 (SEQ ID NO: 746), GI_168037934 (SEQ ID NO: 747), CeresClone_682858 (SEQ ID NO: 749), GI_222822689 (SEQ ID NO: 750), CeresAnnot_8644539 (SEQ ID NO: 752), GI 222822663 (SEQ ID NO: 753), GI_168018442 (SEQ ID NO: 754), GI_242081565 (SEQ ID NO: 755), CeresClone_1463779 (SEQ ID NO: 757), CeresAnnot_8713173 (SEQ ID NO: 759), GI_225455582 (SEQ ID NO: 760), GI_218189113 (SEQ ID NO: 761), GI_302755624 (SEQ ID NO: 762), CeresClone_1778054 (SEQ ID NO: 764), GI_302822895 (SEQ ID NO: 765), GI_255638082 (SEQ ID NO: 766), GI_297746352 (SEQ ID NO: 767), GI_255640538 (SEQ ID NO: 768), GI_13276697 (SEQ ID NO: 769), GI_255628269 (SEQ ID NO: 770), GI_297804888 (SEQ ID NO: 771), and GI_297736227 (SEQ ID NO: 772). In some cases, a functional homolog of SEQ ID NO: 451 has an amino acid sequence with at least 45% sequence identity, e.g., 50%, 52%, 56%, 59%, 61%, 65%, 70%, 75%, 80%, 85%, 90%, 95%, 97%, 98%, or 99% sequence identity, to the amino acid sequence set forth in SEQ ID NO: 451. In some cases, a functional homolog of SEQ ID NO: 451 has an amino acid sequence with at least 45% sequence identity, e.g., 50%, 52%, 56%, 59%, 61%, 65%, 70%, 75%, 80%, 85%, 90%, 95%, 97%, 98%, or 99% sequence identity, to one or more functional homologs of SEQ ID NO: 451 described above or set forth in the Sequence Listing.

[0064] Examples of amino acid sequences of functional homologs of the polypeptide set forth in SEQ ID NO: 2 are provided in FIG. 4 and in the Sequence Listing. Such functional homologs include, for example, GI_239053200 (SEQ ID NO: 3), GI_242043390 (SEQ ID NO: 4), GI_4218535 (SEQ ID NO: 5), CeresAnnot_1706255 (SEQ ID NO: 7), GI_82400207 (SEQ ID NO: 8), GI_326514348 (SEQ ID NO: 9), GI_225435840 (SEQ ID NO: 10), GI_155965519 (SEQ ID NO: 11), GI_116791569 (SEQ ID NO: 12), GI_82568708 (SEQ ID NO: 13), GI_21105748 (SEQ ID NO: 14), GI_154362215 (SEQ ID NO: 15), CeresClone_1804251 (SEQ ID NO: 17), CeresClone_219367 (SEQ ID NO: 19), GI_226528637 (SEQ ID NO: 20), CeresClone_100906935 (SEQ ID NO: 22), CeresClone_1902485 (SEQ ID NO: 24), CeresClone_754901 (SEQ ID NO: 26), CeresClone_1804740 (SEQ ID NO: 28), GI_88770831 (SEQ ID NO: 29), CeresClone_100885834 (SEQ ID NO: 31), GI_125557725 (SEQ ID NO: 32), GI_115471229 (SEQ ID NO: 33), CeresAnnot 8631975 (SEQ ID NO: 35), GI_261349144 (SEQ ID NO: 36), CeresClone 261978 (SEQ ID NO: 38), CeresClone_1797688 (SEQ ID NO: 40), GI_300510868 (SEQ ID NO: 41), GI_51702426 (SEQ ID NO: 42), GI_219884691 (SEQ ID NO: 43), GI_292659262 (SEQ ID NO: 44), GI_82400213 (SEQ ID NO: 45), CeresClone_1566599 (SEQ ID NO: 47), GI_6730938 (SEQ ID NO: 48), GI_125528153 (SEQ ID NO: 49), GI_185179439 (SEQ ID NO: 50), CeresClone_1810747 (SEQ ID NO: 52), CeresClone_736293 (SEQ ID NO: 54), GI_292659260 (SEQ ID NO: 55), GI_242059063 (SEQ ID NO: 56), GI_82400209 (SEQ ID NO: 57), GI_223975401 (SEQ ID NO: 58), GI_138753440 (SEQ ID NO: 59), CeresClone_101131915 (SEQ ID NO: 61), CeresClone_100821085 (SEQ ID NO: 63), GI_302399001 (SEQ ID NO: 64), GI_225459603 (SEQ TD NO: 65), GI_302141792 (SEQ TD NO: 66), GI_125572421 (SEQ ID NO: 67), CeresClone_542522 (SEQ ID NO: 69), GI_195549547 (SEQ ID NO: 70), CeresClone_100961037 (SEQ ID NO: 72), GI_255640977 (SEQ ID NO: 73), CeresClone_1850651 (SEQ ID NO: 75), CeresAnnot_8462230 (SEQ ID NO: 77), GI_198400323 (SEQ ID NO: 78), GI_254034330 (SEQ ID NO: 79), CeresClone_100066176 (SEQ ID NO: 81), GI_206584339 (SEQ ID NO: 82), GI_224063050 (SEQ ID NO: 83), GI_312282805 (SEQ ID NO: 84), GI_255558632 (SEQ ID NO: 85), GI_21105734 (SEQ ID NO: 86), GI_116784797 (SEQ ID NO: 87), GI_187940307 (SEQ ID NO: 88), GI_184097796 (SEQ ID NO: 89), GI_222631638 (SEQ ID NO: 90), GI_116782512 (SEQ ID NO: 91), CeresClone_1220729 (SEQ ID NO: 93), GI_14485513 (SEQ ID NO: 94), CeresClone_514804 (SEQ ID NO: 96), GI_155008462 (SEQ ID NO: 97), GI_292659252 (SEQ ID NO: 98), GI_296044564 (SEQ ID NO: 99), GI_187940295 (SEQ ID NO: 100), CeresAnnot_8732688 (SEQ ID NO: 102), GI_302789271 (SEQ ID NO: 103), GI_206584337 (SEQ ID NO: 104), GI_326490045 (SEQ ID NO: 105), GI_31322570 (SEQ ID NO: 106), GI_168000027 (SEQ ID NO: 107), GI_297839605 (SEQ ID NO: 108), GI_62546185 (SEQ ID NO: 109), GI_147802535 (SEQ ID NO: 110), GI_302820063 (SEQ ID NO: 111), CeresClone_1769201 (SEQ ID NO: 113), CeresClone_477097 (SEQ ID NO: 115), CeresClone_1910025 (SEQ ID NO: 117), CeresAnnot_8669922 (SEQ ID NO: 119), GI_31322574 (SEQ ID NO: 120), GI_187940273 (SEQ ID NO: 121), GI_15223963 (SEQ ID NO: 122), CeresClone_100038358 (SEQ ID NO: 124), GI 148615629 (SEQ ID NO: 125), GI_225461361 (SEQ ID NO: 126), GI_255563837 (SEQ ID NO: 127), CeresClone_1727754 (SEQ ID NO: 129), CeresClone_1808216 (SEQ ID NO: 131), GI_195549534 (SEQ ID NO: 132), CeresAnnot_1466775 (SEQ ID NO: 134), CeresClone_23342 (SEQ ID NO: 136), GI_209171097 (SEQ ID NO: 137), GI_138753442 (SEQ ID NO: 138), CeresClone_1431867 (SEQ ID NO: 140), CeresClone_36478 (SEQ ID NO: 142), CeresClone_1864096 (SEQ ID NO: 144), CeresAnnot_1452119 (SEQ ID NO: 146), GI_302774106 (SEQ ID NO: 147), GI_171452372 (SEQ ID NO: 148), GI_297810999 (SEQ ID NO: 149), GI_21593134 (SEQ ID NO: 150), GI_125572883 (SEQ ID NO: 151), GI_242877145 (SEQ ID NO: 152), GI_125528621 (SEQ ID NO: 153), GI_115441473 (SEQ ID NO: 154), GI_31322566 (SEQ ID NO: 155), GI_224128213 (SEQ ID NO: 156), CeresClone_481915 (SEQ ID NO: 158), GI_31322580 (SEQ ID NO: 159), GI_311701727 (SEQ ID NO: 160), CeresClone_1434586 (SEQ ID NO: 162), GI_58013003 (SEQ ID NO: 163), GI_255586554 (SEQ ID NO: 164), CeresClone_1370400 (SEQ ID NO: 166), GI_312283489 (SEQ ID NO: 167), CeresAnnot_8453910 (SEQ ID NO: 169), CeresClone_1824711 (SEQ ID NO: 171), GI_57233056 (SEQ ID NO: 172), GI_167614348 (SEQ ID NO: 173), GI_296082607 (SEQ ID NO: 174), GI_62546187 (SEQ ID NO: 175), GI_62546189 (SEQ ID NO: 176), GI_31322568 (SEQ ID NO: 177), GI_66275774 (SEQ ID NO: 178), GI_225438363 (SEQ ID NO: 179), GI_124021383 (SEQ ID NO: 180), GI_224081060 (SEQ ID NO: 181), GI_255583865 (SEQ ID NO: 182), GI_217073174 (SEQ ID NO: 183), GI_168038326 (SEQ ID NO: 184), GI_295913643 (SEQ ID NO: 185), GI_31322578 (SEQ ID NO: 186), GI_118486672 (SEQ ID NO: 187), GI_15232604 (SEQ ID NO: 188), CeresAnnot_8683724 (SEQ ID NO: 190), GI_187940303 (SEQ ID NO: 191), GI_311780299 (SEQ ID NO: 192), GI_297830130 (SEQ ID NO: 193), GI_117586720 (SEQ ID NO: 194), GI_193237579 (SEQ ID NO: 195), CeresClone_1827014 (SEQ ID NO: 197), GI_31322576 (SEQ ID NO: 198), GI_255555947 (SEQ ID NO: 199), GI_125533643 (SEQ ID NO: 200), GI_118490007 (SEQ ID NO: 201), GI_21536744 (SEQ ID NO: 202), GI_302399025 (SEQ ID NO: 203), CeresClone_100046091 (SEQ ID NO: 205), CeresClone 20909 (SEQ ID NO: 207), CeresClone_1803889 (SEQ ID NO: 209), CeresAnnot_1456291 (SEQ ID NO: 211), GI_311976585 (SEQ ID NO: 212), GI_302399005 (SEQ ID NO: 213), GI_297744870 (SEQ ID NO: 214), GI_15223456 (SEQ ID NO: 215), GI_63252923 (SEQ ID NO: 216), GI_255636538 (SEQ ID NO: 217), GI_113205414 (SEQ ID NO: 218), GI_113205453 (SEQ ID NO: 219), GI_255635167 (SEQ ID NO: 220), GI_206584345 (SEQ ID NO: 221), CeresAnnot 867355 (SEQ ID NO: 223), GI_242877103 (SEQ ID NO: 224), GI_302793560 (SEQ ID NO: 225), CeresClone_38344 (SEQ ID NO: 227), GI_31322582 (SEQ ID NO: 228), GI_115336269 (SEQ ID NO: 229), GI_311115260 (SEQ ID NO: 230), GI_168054147 (SEQ ID NO: 231), GI_311115262 (SEQ ID NO: 232), GI_168034283 (SEQ ID NO: 233), GI_15148914 (SEQ ID NO: 234), and GI_302767458 (SEQ ID NO: 235). In some cases, a functional homolog of SEQ ID NO: 2 has an amino acid sequence with at least 45% sequence identity, e.g., 50%, 52%, 56%, 59%, 61%, 65%, 70%, 75%, 80%, 85%, 90%, 95%, 97%, 98%, or 99% sequence identity, to the amino acid sequence set forth in SEQ ID NO: 2. In some cases, a functional homolog of SEQ ID NO: 2 has an amino acid sequence with at least 45% sequence identity, e.g., 50%, 52%, 56%, 59%, 61%, 65%, 70%, 75%, 80%, 85%, 90%, 95%, 97%, 98%, or 99% sequence identity, to one or more functional homologs of SEQ ID NO: 2 described above or set forth in the Sequence Listing.

[0065] The identification of conserved regions in an aluminum tolerance-modulating polypeptide facilitates production of variants of aluminum tolerance-modulating polypeptides. Variants of aluminum tolerance-modulating polypeptides typically have 10 or fewer conservative amino acid substitutions within the primary amino acid sequence, e.g., 7 or fewer conservative amino acid substitutions, 5 or fewer conservative amino acid substitutions, or between 1 and 5 conservative substitutions. A useful variant polypeptide can be constructed based on one of the alignments set forth in FIG. 1, FIG. 2, FIG. 3, or FIG. 4, and/or homologs identified in the Sequence Listing. Such a polypeptide includes the conserved regions, arranged in the order depicted in the Figure from amino-terminal end to carboxy-terminal end. Such a polypeptide may also include zero, one, or more than one amino acid in positions marked by dashes. When no amino acids are present at positions marked by dashes, the length of such a polypeptide is the sum of the amino acid residues in all conserved regions. When amino acids are present at a position marked by dashes, such a polypeptide has a length that is the sum of the amino acid residues in all conserved regions and all dashes.

[0066] C. Functional Homologs Identified by HMMER In some embodiments, useful aluminum tolerance-modulating polypeptides include those that fit a Hidden Markov Model based on the polypeptides set forth in any one of FIGS. 1-4. A Hidden Markov Model (HMM) is a statistical model of a consensus sequence for a group of functional homologs. See, Durbin et al., Biological Sequence Analysis: Probabilistic Models of Proteins and Nucleic Acids, Cambridge University Press, Cambridge, UK (1998). An HMM is generated by the program HMMER 2.3.2 with default program parameters, using the sequences of the group of functional homologs as input. The multiple sequence alignment is generated by ProbCons (Do et al., Genome Res., 15(2):330-40 (2005)) version 1.11 using a set of default parameters: -c, --consistency REPS of 2; -ir, --iterative-refinement REPS of 100; -pre, --pre-training REPS of 0. ProbCons is a public domain software program provided by Stanford University.

[0067] The default parameters for building an HMM (hmmbuild) are as follows: the default “architecture prior” (archpri) used by MAP architecture construction is 0.85, and the default cutoff threshold (idlevel) used to determine the effective sequence number is 0.62. HMMER 2.3.2 was released Oct. 3, 2003 under a GNU general public license, and is available from various sources on the World Wide Web such as hmmer.janclia.org; hmmer.wustl.edu; and fr.com/hmmer232/. Hmmbuild outputs the model as a text file.

[0068] The HMM for a group of functional homologs can be used to determine the likelihood that a candidate aluminum tolerance-modulating polypeptide sequence is a better fit to that particular HMM than to a null HMM generated using a group of sequences that are not structurally or functionally related. The likelihood that a candidate polypeptide sequence is a better fit to an HMM than to a null HMM is indicated by the HMM bit score, a number generated when the candidate sequence is fitted to the HMM profile using the HMMER hmmsearch program. The following default parameters are used when running hmmsearch: the default E-value cutoff (E) is 10.0, the default bit score cutoff (T) is negative infinity, the default number of sequences in a database (Z) is the real number of sequences in the database, the default E-value cutoff for the per-domain ranked hit list (domE) is infinity, and the default bit score cutoff for the per-domain ranked hit list (domT) is negative infinity. A high HMM bit score indicates a greater likelihood that the candidate sequence carries out one or more of the biochemical or physiological function(s) of the polypeptides used to generate the HMM. A high HMM bit score is at least 20, and often is higher. Slight variations in the HMM bit score of a particular sequence can occur due to factors such as the order in which sequences are processed for alignment by multiple sequence alignment algorithms such as the ProbCons program. Nevertheless, such HMM bit score variation is minor.

[0069] The aluminum tolerance-modulating polypeptides discussed below fit the indicated HMM with an HMM bit score greater than to 65 (e.g., greater than 70, 80, 90, 100, 120, 140, 200, 300, 400, 500, 600, 700, 800, 900, 1000, 1500, or 2000). In some embodiments, the HMM bit score of an aluminum tolerance-modulating polypeptide discussed below is about 50%, 60%, 70%, 80%, 90%, or 95% of the HMM bit score of a functional homolog provided in the Sequence Listing of this application. In some embodiments, an aluminum tolerance-modulating polypeptide discussed below fits the indicated HMM with an HMM bit score greater than 210, and has a domain indicative of an aluminum tolerance-modulating polypeptide. In some embodiments, an aluminum tolerance-modulating polypeptide discussed below fits the indicated HMM with an HMM bit score greater than 210, and has 65% or greater sequence identity (e.g., 75%, 80%, 85%, 90%, 95%, or 100% sequence identity) to an amino acid sequence shown in any one of FIGS. 1-4.

[0070] Examples of polypeptides are shown in the sequence listing that have HMM bit scores greater than 159 (e.g., greater than 160, 170, 180, 190, 200, 225, 250, 275, 300, 325, 350, 375, 400, 425, 450, 475, 500, 525, 550, 575, 600, 625, 650, 675, 700, 725, 750, 775, 800, 825, 850, 875, 900, 925, 950, 975, 1000, 1025, 1050, 1075, 1100, 1125, 1150, 1175, 1200, 1225, 1250, or 1260) when fitted to an HMM generated from the amino acid sequences set forth in FIG. 1 are identified in the Sequence Listing of this application. Such polypeptides include, for example, SEQ ID NOs: 353, 355, 357, 358, 360, 362, 364, 366, 368, 369, 371, 373, 375, 376, 377, 378, 379, 380, 382, 384, 386, 388, 390, 392, 393, 395, 396, 397, 398, 399, 400, 401, 402, 404, 405, 407, 409, 411, 413, 414, 416, 418, 420, 421, 423, 424, 425, 426, 428, 429, 431, 432, 433, 434, 435, 436, 437, 438, 439, 440, 441, 442, 443, 444, 445, 446, 447, and 449.

[0071] Examples of polypeptides are shown in the sequence listing that have HMM bit scores greater than 83 (e.g., greater than 85, 90, 95, 100, 110, 120, 130, 140, 150, 175, 200, 225, 250, 275, or 300) when fitted to an HMM generated from the amino acid sequences set forth in FIG. 2 are identified in the Sequence Listing of this application. Such polypeptides include, for example, SEQ ID NOs: 237, 239, 241, 243, 245, 246, 248, 250, 251, 253, 255, 257, 258, 259, 261, 263, 265, 267, 269, 271, 273, 274, 276, 278, 280, 281, 283, 284, 285, 287, 288, 290, 292, 293, 294, 296, 298, 300, 302, 304, 306, 308, 310, 312, 314, 316, 318, 320, 322, 324, 326, 328, 329, 331, 333, 335, 337, 338, 339, 341, 342, 343, 344, 345, 346, 347, 348, 349, 350, and 351.

[0072] Examples of polypeptides are shown in the sequence listing that have HMM bit scores greater than 100 (e.g., greater than 110, 120, 130, 140, 150, 160, 170, 180, 190, 200, 225, 250, 275, 300, 325, 350, 375, 400, 410, 420, or 430) when fitted to an HMM generated from the amino acid sequences set forth in FIG. 3 are identified in the Sequence Listing of this application. Such polypeptides include, for example, SEQ ID NOs: 451, 453, 454, 456, 457, 458, 459, 460, 461, 462, 463, 465, 467, 468, 469, 470, 471, 472, 473, 474, 475, 476, 478, 480, 482, 484, 486, 488, 490, 492, 494, 496, 498, 500, 502, 504, 506, 508, 510, 512, 514, 516, 518, 520, 522, 524, 526, 528, 530, 532, 534, 535, 537, 539, 540, 542, 544, 545, 547, 549, 551, 553, 555, 557, 558,560, 562, 564, 568, 570, 572, 574, 576, 578, 579, 580, 581, 583, 585, 587, 589, 591, 593, 595, 597, 599, 601, 603, 605, 607, 608, 610, 612, 614, 616, 618, 620, 622, 624, 625, 627, 629, 631, 633, 635, 637, 639, 641, 643, 645, 647, 649, 650, 651, 652, 653, 654, 655, 656,657, 658, 660, 662, 664, 666, 668, 669, 670, 671, 672, 673, 674, 675, 676, 677, 679, 681, 683, 685, 686, 687, 689, 691, 693, 695, 696, 698, 699, 701, 702, 703, 704, 705, 706, 707, 709, 710, 711, 712, 713, 714, 715, 716, 717, 718, 719, 721, 722, 723, 724, 725, 726, 727, 728, 729, 730, 731, 732, 733, 734, 735, 736, 737, 738, 739, 740, 742, 744, 745, 746, 747, 749, 750, 752, 753, 754, 755, 757, 759, 760, 761, 762, 764, 765, 766, 767, 768, 769,770, 771, and 772.

[0073] Examples of polypeptides are shown in the sequence listing that have HMM bit scores greater than 204 (e.g., greater than 210, 220, 230, 240, 250, 260, 270, 280, 290, 300, 325, 350, 375, 400, 425, 450, 475, 500, 525, 550, 575, 600, 625, 650, 675, or 700) when fitted to an HMM generated from the amino acid sequences set forth in FIG. 4 are identified in the Sequence Listing of this application. Such polypeptides include, for example, SEQ ID NOs: 2, 3, 4, 5, 7, 8, 9, 10, 11, 12, 13, 14, 15, 17, 19, 20, 22, 24, 26, 28, 29, 31, 32, 33, 35, 36, 38, 40, 41, 42, 43, 44, 45, 47, 48, 49, 50, 52, 54, 55, 56, 57, 58, 59, 61, 63, 64, 65, 66, 67, 69, 70, 72, 73, 75, 77, 78, 79, 81, 82, 83, 84, 85, 86, 87, 88, 89, 90, 91, 93, 94, 96, 97, 98, 99, 100, 102, 103, 104, 105, 106, 107, 108, 109, 110, 111, 113, 115, 117, 119, 120, 121, 122, 124, 125, 126, 127, 129, 131, 132, 134, 136, 137, 138, 140, 142, 144, 146, 147, 148, 149, 150, 151, 152, 153, 154, 155, 156, 158, 159, 160, 162, 163, 164, 166, 167, 169, 171, 172, 173, 174, 175, 176, 177, 178, 179, 180, 181, 182, 183, 184, 185, 186, 187, 188, 190, 191, 192, 193, 194, 195, 197, 198, 199, 200, 201, 202, 203, 205, 207, 209, 211, 212, 213, 214, 215, 216, 217, 218, 219, 220, 221, 223, 224, 225, 227, 228, 229, 230, 231, 232, 233, 234, and 235.

[0074] D. Percent Identity

[0075] In some embodiments, an aluminum tolerance-modulating polypeptide has an amino acid sequence with at least 45% sequence identity, e.g., 50%, 52%, 56%, 59%, 61%, 65%, 70%, 75%, 80%, 85%, 90%, 95%, 97%, 98%, or 99% sequence identity, to one of the amino acid sequences set forth in SEQ ID NOs: 2, 3, 4, 5, 7, 8, 9, 10, 11, 12, 13, 14, 15, 17, 19, 20, 22, 24, 26, 28, 29, 31, 32, 33, 35, 36, 38, 40, 41, 42, 43, 44, 45, 47, 48, 49, 50, 52, 54, 55, 56, 57, 58, 59, 61, 63, 64, 65, 66, 67, 69, 70, 72, 73, 75, 77, 78, 79, 81, 82, 83, 84, 85, 86, 87, 88, 89, 90, 91, 93, 94, 96, 97, 98, 99, 100, 102, 103, 104, 105, 106, 107, 108, 109, 110, 111, 113, 115, 117, 119, 120, 121, 122, 124, 125, 126, 127, 129, 131, 132, 134, 136, 137, 138, 140, 142, 144, 146, 147, 148, 149, 150, 151, 152, 153, 154, 155, 156, 158, 159, 160, 162, 163, 164, 166, 167, 169, 171, 172, 173, 174, 175, 176, 177, 178, 179, 180, 181, 182, 183, 184, 185, 186, 187, 188, 190, 191, 192, 193, 194, 195, 197, 198, 199, 200, 201, 202, 203, 205, 207, 209, 211, 212, 213, 214, 215, 216, 217, 218, 219, 220, 221, 223, 224, 225, 227, 228, 229, 230, 231, 232, 233, 234, 235, 237, 239, 241, 243, 245, 246, 248, 250, 251, 253, 255, 257, 258, 259, 261, 263, 265, 267, 269, 271, 273, 274, 276, 278, 280, 281, 283, 284, 285, 287, 288, 290, 292, 293, 294, 296, 298, 300, 302, 304, 306, 308, 310, 312, 314, 316, 318, 320, 322, 324, 326, 328, 329, 331, 333, 335, 337, 338, 339, 341, 342, 343, 344, 345, 346, 347, 348, 349, 350, 351, 353, 355, 357, 358, 360, 362, 364, 366, 368, 369, 371, 373, 375, 376, 377, 378, 379, 380, 382, 384, 386, 388, 390, 392, 393, 395, 396, 397, 398, 399, 400, 401, 402, 404, 405, 407, 409, 411, 413, 414, 416, 418, 420, 421, 423, 424, 425, 426, 428, 429, 431, 432, 433, 434, 435, 436, 437, 438, 439, 440, 441, 442, 443, 444, 445, 446, 447, 449, 451, 453, 454, 456, 457, 458, 459, 460, 461, 462, 463, 465, 467, 468, 469, 470, 471, 472, 473, 474, 475, 476, 478, 480, 482, 484, 486, 488, 490, 492, 494, 496, 498, 500, 502, 504, 506, 508, 510, 512, 514, 516, 518, 520, 522, 524, 526, 528, 530, 532, 534, 535, 537, 539, 540, 542, 544, 545, 547, 549, 551, 553, 555, 557, 558,560, 562, 564, 568, 570, 572, 574, 576, 578, 579, 580, 581, 583, 585, 587, 589, 591, 593, 595, 597, 599, 601, 603, 605, 607, 608, 610, 612, 614, 616, 618, 620, 622, 624, 625, 627, 629, 631, 633, 635, 637, 639, 641, 643, 645, 647, 649, 650, 651, 652, 653, 654, 655, 656,657, 658, 660, 662, 664, 666, 668, 669, 670, 671, 672, 673, 674, 675, 676, 677, 679, 681, 683, 685, 686, 687, 689, 691, 693, 695, 696, 698, 699, 701, 702, 703, 704, 705, 706, 707, 709, 710, 711, 712, 713, 714, 715, 716, 717, 718, 719, 721, 722, 723, 724, 725, 726, 727, 728, 729, 730, 731, 732, 733, 734, 735, 736, 737, 738, 739, 740, 742, 744, 745, 746, 747, 749, 750, 752, 753, 754, 755, 757, 759, 760, 761, 762, 764, 765, 766, 767, 768, 769,770, 771, and 772. Polypeptides having such a percent sequence identity often have a domain indicative of an aluminum tolerance-modulating polypeptide and/or have an HMM bit score that is greater than 65, as discussed above. Amino acid sequences of aluminum tolerance-modulating polypeptides having at least 80% sequence identity to one of the amino acid sequences set forth in SEQ ID NOs: 2, 3, 4, 5, 7, 8, 9, 10, 11, 12, 13, 14, 15, 17, 19, 20, 22, 24, 26, 28, 29, 31, 32, 33, 35, 36, 38, 40, 41, 42, 43, 44, 45, 47, 48, 49, 50, 52, 54, 55, 56, 57, 58, 59, 61, 63, 64, 65, 66, 67, 69, 70, 72, 73, 75, 77, 78, 79, 81, 82, 83, 84, 85, 86, 87, 88, 89, 90, 91, 93, 94, 96, 97, 98, 99, 100, 102, 103, 104, 105, 106, 107, 108, 109, 110, 111, 113, 115, 117, 119, 120, 121, 122, 124, 125, 126, 127, 129, 131, 132, 134, 136, 137, 138, 140, 142, 144, 146, 147, 148, 149, 150, 151, 152, 153, 154, 155, 156, 158, 159, 160, 162, 163, 164, 166, 167, 169, 171, 172, 173, 174, 175, 176, 177, 178, 179, 180, 181, 182, 183, 184, 185, 186, 187, 188, 190, 191, 192, 193, 194, 195, 197, 198, 199, 200, 201, 202, 203, 205, 207, 209, 211, 212, 213, 214, 215, 216, 217, 218, 219, 220, 221, 223, 224, 225, 227, 228, 229, 230, 231, 232, 233, 234, 235, 237, 239, 241, 243, 245, 246, 248, 250, 251, 253, 255, 257, 258, 259, 261, 263, 265, 267, 269, 271, 273, 274, 276, 278, 280, 281, 283, 284, 285, 287, 288, 290, 292, 293, 294, 296, 298, 300, 302, 304, 306, 308, 310, 312, 314, 316, 318, 320, 322, 324, 326, 328, 329, 331, 333, 335, 337, 338, 339, 341, 342, 343, 344, 345, 346, 347, 348, 349, 350, 351, 353, 355, 357, 358, 360, 362, 364, 366, 368, 369, 371, 373, 375, 376, 377, 378, 379, 380, 382, 384, 386, 388, 390, 392, 393, 395, 396, 397, 398, 399, 400, 401, 402, 404, 405, 407, 409, 411, 413, 414, 416, 418, 420, 421, 423, 424, 425, 426, 428, 429, 431, 432, 433, 434, 435, 436, 437, 438, 439, 440, 441, 442, 443, 444, 445, 446, 447, 449, 451, 453, 454, 456, 457, 458, 459, 460, 461, 462, 463, 465, 467, 468, 469, 470, 471, 472, 473, 474, 475, 476, 478, 480, 482, 484, 486, 488, 490, 492, 494, 496, 498, 500, 502, 504, 506, 508, 510, 512, 514, 516, 518, 520, 522, 524, 526, 528, 530, 532, 534, 535, 537, 539, 540, 542, 544, 545, 547, 549, 551, 553, 555, 557, 558,560, 562, 564, 568, 570, 572, 574, 576, 578, 579, 580, 581, 583, 585, 587, 589, 591, 593, 595, 597, 599, 601, 603, 605, 607, 608, 610, 612, 614, 616, 618, 620, 622, 624, 625, 627, 629, 631, 633, 635, 637, 639, 641, 643, 645, 647, 649, 650, 651, 652, 653, 654, 655, 656,657, 658, 660, 662, 664, 666, 668, 669, 670, 671, 672, 673, 674, 675, 676, 677, 679, 681, 683, 685, 686, 687, 689, 691, 693, 695, 696, 698, 699, 701, 702, 703, 704, 705, 706, 707, 709, 710, 711, 712, 713, 714, 715, 716, 717, 718, 719, 721, 722, 723, 724, 725, 726, 727, 728, 729, 730, 731, 732, 733, 734, 735, 736, 737, 738, 739, 740, 742, 744, 745, 746, 747, 749, 750, 752, 753, 754, 755, 757, 759, 760, 761, 762, 764, 765, 766, 767, 768, 769,770, 771, and 772 are provided in FIGS. 1-4 and in the Sequence Listing.

[0076] “Percent sequence identity” refers to the degree of sequence identity between any given reference sequence, e.g., SEQ ID NO: 1, and a candidate aluminum tolerance-modulating sequence. A candidate sequence typically has a length that is from 80 percent to 200 percent of the length of the reference sequence, e.g., 82, 85, 87, 89, 90, 93, 95, 97, 99, 100, 105, 110, 115, 120, 130, 140, 150, 160, 170, 180, 190, or 200 percent of the length of the reference sequence. A percent identity for any candidate nucleic acid or polypeptide relative to a reference nucleic acid or polypeptide can be determined as follows. A reference sequence (e.g., a nucleic acid sequence or an amino acid sequence) is aligned to one or more candidate sequences using the computer program ClustalW (version 1.83, default parameters), which allows alignments of nucleic acid or polypeptide sequences to be carried out across their entire length (global alignment). Chenna et al., Nucleic Acids Res., 31(13):3497-500 (2003).

[0077] ClustalW calculates the best match between a reference and one or more candidate sequences, and aligns them so that identities, similarities and differences can be determined. Gaps of one or more residues can be inserted into a reference sequence, a candidate sequence, or both, to maximize sequence alignments. For fast pairwise alignment of nucleic acid sequences, the following default parameters are used: word size: 2; window size: 4; scoring method: percentage; number of top diagonals: 4; and gap penalty: 5. For multiple alignment of nucleic acid sequences, the following parameters are used: gap opening penalty: 10.0; gap extension penalty: 5.0; and weight transitions: yes. For fast pairwise alignment of protein sequences, the following parameters are used: word size: 1; window size: 5; scoring method: percentage; number of top diagonals: 5; gap penalty: 3. For multiple alignment of protein sequences, the following parameters are used: weight matrix: blosum; gap opening penalty: 10.0; gap extension penalty: 0.05; hydrophilic gaps: on; hydrophilic residues: Gly, Pro, Ser, Asn, Asp, Gln, Glu, Arg, and Lys; residue-specific gap penalties: on. The ClustalW output is a sequence alignment that reflects the relationship between sequences. ClustalW can be run, for example, at the Baylor College of Medicine Search Launcher site on the World Wide Web (searchlauncher.bcm.tmc.edu/multi-align/multi-align.html) and at the European Bioinformatics Institute site on the World Wide Web (ebi.ac.uk/clustalw).

[0078] To determine percent identity of a candidate nucleic acid or amino acid sequence to a reference sequence, the sequences are aligned using ClustalW, the number of identical matches in the alignment is divided by the length of the reference sequence, and the result is multiplied by 100. It is noted that the percent identity value can be rounded to the nearest tenth. For example, 78.11, 78.12, 78.13, and 78.14 are rounded down to 78.1, while 78.15, 78.16, 78.17, 78.18, and 78.19 are rounded up to 78.2.

[0079] In some cases, an aluminum tolerance-modulating polypeptide has an amino acid sequence with at least 45% sequence identity, e.g., 50%, 52%, 56%, 59%, 61%, 65%, 70%, 75%, 80%, 85%, 90%, 95%, 97%, 98%, or 99% sequence identity, to the amino acid sequence set forth in SEQ ID NO: 353. Amino acid sequences of polypeptides having greater than 45% sequence identity to the polypeptide set forth in SEQ ID NO: 353 are provided in FIG. 1 and in the Sequence Listing.

[0080] In some cases, an aluminum tolerance-modulating polypeptide has an amino acid sequence with at least 45% sequence identity, e.g., 50%, 52%, 56%, 59%, 61%, 65%, 70%, 75%, 80%, 85%, 90%, 95%, 97%, 98%, or 99% sequence identity, to the amino acid sequence set forth in SEQ ID NO: 237. Amino acid sequences of polypeptides having greater than 45% sequence identity to the polypeptide set forth in SEQ ID NO: 237 are provided in FIG. 2 and in the Sequence Listing.

[0081] In some cases, an aluminum tolerance-modulating polypeptide has an amino acid sequence with at least 45% sequence identity, e.g., 50%, 52%, 56%, 59%, 61%, 65%, 70%, 75%, 80%, 85%, 90%, 95%, 97%, 98%, or 99% sequence identity, to the amino acid sequence set forth in SEQ ID NO: 451. Amino acid sequences of polypeptides having greater than 45% sequence identity to the polypeptide set forth in SEQ ID NO: 451 are provided in FIG. 3 and in the Sequence Listing.

[0082] In some cases, an aluminum tolerance-modulating polypeptide has an amino acid sequence with at least 45% sequence identity, e.g., 50%, 52%, 56%, 59%, 61%, 65%, 70%, 75%, 80%, 85%, 90%, 95%, 97%, 98%, or 99% sequence identity, to the amino acid sequence set forth in SEQ ID NO: 2. Amino acid sequences of polypeptides having greater than 45% sequence identity to the polypeptide set forth in SEQ ID NO: 2 are provided in FIG. 4 and in the Sequence Listing.

[0083] E. Other Sequences

[0084] It should be appreciated that an aluminum tolerance-modulating polypeptide can include additional amino acids that are not involved in aluminum tolerance modulation, and thus such a polypeptide can be longer than would otherwise be the case. For example, an aluminum tolerance-modulating polypeptide can include a purification tag, a chloroplast transit peptide, a mitochondrial transit peptide, an amyloplast peptide, or a leader sequence added to the amino or carboxy terminus. In some embodiments, an aluminum tolerance-modulating polypeptide includes an amino acid sequence that functions as a reporter, e.g., a green fluorescent protein or yellow fluorescent protein.

### III. NUCLEIC ACIDS

[0085] Nucleic acids described herein include nucleic acids that are effective to modulate aluminum tolerance levels when transcribed in a plant or plant cell. Such nucleic acids include, without limitation, those that encode an aluminum tolerance-modulating polypeptide and those that can be used to inhibit expression of an aluminum tolerance-modulating polypeptide via a nucleic acid based method.

[0086] A. Nucleic Acids Encoding Aluminum Tolerance-Modulating Polypeptides

[0087] Nucleic acids encoding aluminum tolerance-modulating polypeptides are described herein. Examples of such nucleic acids include SEQ ID NOs: 1, 6, 16, 18, 21, 23, 25, 27, 30, 34, 37, 39, 46, 51, 53, 60, 62, 68, 71, 74, 76, 80, 92, 95, 101, 112, 114, 116, 118, 123, 128, 130, 133, 135, 139, 141, 143, 145, 157, 161, 165, 168, 170, 189, 196, 204, 206, 208, 210, 222, 226, 236, 238, 240, 242, 244, 247, 249, 252, 254, 256, 260, 262, 264, 266, 268, 270, 272, 275, 277, 279, 282, 286, 289, 291, 295, 297, 299, 301, 303, 305, 307, 309, 311, 313, 315, 317, 319, 321, 323, 325, 327, 330, 332, 334, 336, 340, 352, 354, 356, 359, 361, 363, 365, 367, 370, 372, 374, 381, 383, 385, 387, 389, 391, 394, 403, 406, 408, 410, 412, 415, 417, 419, 422, 427, 430, 448, 450, 452, 455, 464, 466, 477, 479, 481, 483, 485, 487, 489, 491, 493, 495, 497, 499, 501, 503, 505, 507, 509, 511, 513, 515, 517, 519, 521, 523, 525, 527, 529, 531, 533, 536, 538, 541, 543, 546, 548, 550, 552, 554, 556, 559, 561, 563, 567, 569, 571, 573, 575, 577, 582, 584, 586, 588, 590, 592, 594, 596, 598, 600, 602, 604, 606, 609, 611, 613, 615, 617, 619, 621, 623, 626, 628, 630, 632, 634, 636, 638, 640, 642, 644, 646, 648, 659, 661, 663, 665, 667, 678, 680, 682, 684, 688, 690, 692, 694, 697, 700, 708, 720, 741, 743, 748, 751, 756, 758, and 763 as described in more detail below. A nucleic acid also can be a fragment that is at least 40% (e.g., at least 45, 50, 55, 60, 65, 70, 75, 80, 85, 90, 95, or 99%) of the length of the full-length nucleic acid set forth in SEQ ID NOs: 1, 6, 16, 18, 21, 23, 25, 27, 30, 34, 37, 39, 46, 51, 53, 60, 62, 68, 71, 74, 76, 80, 92, 95, 101, 112, 114, 116, 118, 123, 128, 130, 133, 135, 139, 141, 143, 145, 157, 161, 165, 168, 170, 189, 196, 204, 206, 208, 210, 222, 226, 236, 238, 240, 242, 244, 247, 249, 252, 254, 256, 260, 262, 264, 266, 268, 270, 272, 275, 277, 279, 282, 286, 289, 291, 295, 297, 299, 301, 303, 305, 307, 309, 311, 313, 315, 317, 319, 321, 323, 325, 327, 330, 332, 334, 336, 340, 352, 354, 356, 359, 361, 363, 365, 367, 370, 372, 374, 381, 383, 385, 387, 389, 391, 394, 403, 406, 408, 410, 412, 415, 417, 419, 422, 427, 430, 448, 450, 452, 455, 464, 466, 477, 479, 481, 483, 485, 487, 489, 491, 493, 495, 497, 499, 501, 503, 505, 507, 509, 511, 513, 515, 517, 519, 521, 523, 525, 527, 529, 531, 533, 536, 538, 541, 543, 546, 548, 550, 552, 554, 556, 559, 561, 563, 567, 569, 571, 573, 575, 577, 582, 584, 586, 588, 590, 592, 594, 596, 598, 600, 602, 604, 606, 609, 611, 613, 615, 617, 619, 621, 623, 626, 628, 630, 632, 634, 636, 638, 640, 642, 644, 646, 648, 659, 661, 663, 665, 667, 678, 680, 682, 684, 688, 690, 692, 694, 697, 700, 708, 720, 741, 743, 748, 751, 756, 758, and 763.

[0088] An aluminum tolerance-modulating nucleic acid can comprise the nucleotide sequence set forth in SEQ ID NO:352. Alternatively, an aluminum tolerance-modulating nucleic acid can be a variant of the nucleic acid having the nucleotide sequence set forth in SEQ ID NO: 352. For example, an aluminum tolerance-modulating nucleic acid can have a nucleotide sequence with at least 80% sequence identity, e.g., 81%, 85%, 90%, 95%, 97%, 98%, or 99% sequence identity, to the nucleotide sequence set forth in SEQ ID NO: 352.

[0089] An aluminum tolerance-modulating nucleic acid can comprise the nucleotide sequence set forth in SEQ ID NO: 236. Alternatively, an aluminum tolerance-modulating nucleic acid can be a variant of the nucleic acid having the nucleotide sequence set forth in SEQ ID NO: 236. For example, an aluminum tolerance-modulating nucleic acid can have a nucleotide sequence with at least 80% sequence identity, e.g., 81%, 85%, 90%, 95%, 97%, 98%, or 99% sequence identity, to the nucleotide sequence set forth in SEQ ID NO: 236.

[0090] An aluminum tolerance-modulating nucleic acid can comprise the nucleotide sequence set forth in SEQ ID NO: 450. Alternatively, an aluminum tolerance-modulating nucleic acid can be a variant of the nucleic acid having the nucleotide sequence set forth in SEQ ID NO: 450. For example, an aluminum tolerance-modulating nucleic acid can have a nucleotide sequence with at least 80% sequence identity, e.g., 81%, 85%, 90%, 95%, 97%, 98%, or 99% sequence identity, to the nucleotide sequence set forth in SEQ ID NO: 450.

[0091] An aluminum tolerance-modulating nucleic acid can comprise the nucleotide sequence set forth in SEQ ID NO: 1. Alternatively, an aluminum tolerance-modulating nucleic acid can be a variant of the nucleic acid having the nucleotide sequence set forth in SEQ ID NO: 1. For example, an aluminum tolerance-modulating nucleic acid can have a nucleotide sequence with at least 80% sequence identity, e.g., 81%, 85%, 90%, 95%, 97%, 98%, or 99% sequence identity, to the nucleotide sequence set forth in SEQ ID NO: 1.

[0092] Isolated nucleic acid molecules can be produced by standard techniques. For example, polymerase chain reaction (PCR) techniques can be used to obtain an isolated nucleic acid containing a nucleotide sequence described herein. PCR can be used to amplify specific sequences from DNA as well as RNA, including sequences from total genomic DNA or total cellular RNA. Various PCR methods are described, for example, in PCR Primer: A Laboratory Manual, Dieffenbach and Dveksler, eds., Cold Spring Harbor Laboratory Press, 1995. Generally, sequence information from the ends of the region of interest or beyond is employed to design oligonucleotide primers that are identical or similar in sequence to opposite strands of the template to be amplified. Various PCR strategies also are available by which site-specific nucleotide sequence modifications can be introduced into a template nucleic acid. Isolated nucleic acids also can be chemically synthesized, either as a single nucleic acid molecule (e.g., using automated DNA synthesis in the 3′ to 5′ direction using phosphoramidite technology) or as a series of oligonucleotides. For example, one or more pairs of long oligonucleotides (e.g., >100 nucleotides) can be synthesized that contain the desired sequence, with each pair containing a short segment of complementarity (e.g., about 15 nucleotides) such that a duplex is formed when the oligonucleotide pair is annealed. DNA polymerase is used to extend the oligonucleotides, resulting in a single, double-stranded nucleic acid molecule per oligonucleotide pair, which then can be ligated into a vector. Isolated nucleic acids of the invention also can be obtained by mutagenesis of, e.g., a naturally occurring DNA.

[0093] B. Use of Nucleic Acids to Modulate Expression of Polypeptides

[0094] i. Expression of an Aluminum Tolerance-Modulating Polypeptide

[0095] A nucleic acid encoding one of the aluminum tolerance-modulating polypeptides described herein can be used to express the polypeptide in a plant species of interest, typically by transforming a plant cell with a nucleic acid having the coding sequence for the polypeptide operably linked in sense orientation to one or more regulatory regions. It will be appreciated that because of the degeneracy of the genetic code, a number of nucleic acids can encode a particular aluminum tolerance-modulating polypeptide; i.e., for many amino acids, there is more than one nucleotide triplet that serves as the codon for the amino acid. Thus, codons in the coding sequence for a given aluminum tolerance-modulating polypeptide can be modified such that optimal expression in a particular plant species is obtained, using appropriate codon bias tables for that species.

[0096] In some cases, expression of an aluminum tolerance-modulating polypeptide inhibits one or more functions of an endogenous polypeptide. For example, a nucleic acid that encodes a dominant negative polypeptide can be used to inhibit protein function. A dominant negative polypeptide typically is mutated or truncated relative to an endogenous wild type polypeptide, and its presence in a cell inhibits one or more functions of the wild type polypeptide in that cell, i.e., the dominant negative polypeptide is genetically dominant and confers a loss of function. The mechanism by which a dominant negative polypeptide confers such a phenotype can vary but often involves a protein-protein interaction or a protein-DNA interaction. For example, a dominant negative polypeptide can be an enzyme that is truncated relative to a native wild type enzyme, such that the truncated polypeptide retains domains involved in binding a first protein but lacks domains involved in binding a second protein. The truncated polypeptide is thus unable to properly modulate the activity of the second protein. See, e.g., US 2007/0056058. As another example, a point mutation that results in a non-conservative amino acid substitution in a catalytic domain can result in a dominant negative polypeptide. See, e.g., US 2005/032221. As another example, a dominant negative polypeptide can be a transcription factor that is truncated relative to a native wild type transcription factor, such that the truncated polypeptide retains the DNA binding domain(s) but lacks the activation domain(s). Such a truncated polypeptide can inhibit the wild type transcription factor from binding DNA, thereby inhibiting transcription activation.

[0097] ii. Inhibition of Expression of an Aluminum Tolerance-Modulating Polypeptide

[0098] Polynucleotides and recombinant constructs described herein can be used to inhibit expression of an aluminum tolerance-modulating polypeptide in a plant species of interest. See, e.g., Matzke and Birchler, Nature Reviews Genetics 6:24-35 (2005); Akashi et al., Nature Reviews Mol. Cell Biology 6:413-422 (2005); Mittal, Nature Reviews Genetics 5:355-365 (2004); and Nature Reviews RNA interference collection, October 2005 on the World Wide Web at nature.com/reviews/focus/mai. A number of nucleic acid based methods, including antisense RNA, ribozyme directed RNA cleavage, post-transcriptional gene silencing (PTGS), e.g., RNA interference (RNAi), and transcriptional gene silencing (TGS) are known to inhibit gene expression in plants. Suitable polynucleotides include full-length nucleic acids encoding aluminum tolerance-modulating polypeptides or fragments of such full-length nucleic acids. In some embodiments, a complement of the full-length nucleic acid or a fragment thereof can be used. Typically, a fragment is at least 10 nucleotides, e.g., at least 12, 13, 14, 15, 16, 17, 18, 19, 20, 21, 22, 23, 24, 25, 26, 27, 30, 35, 40, 50, 80, 100, 200, 500 nucleotides or more. Generally, higher homology can be used to compensate for the use of a shorter sequence.

[0099] Antisense technology is one well-known method. In this method, a nucleic acid of a gene to be repressed is cloned and operably linked to a regulatory region and a transcription termination sequence so that the antisense strand of RNA is transcribed. The recombinant construct is then transformed into plants, as described herein, and the antisense strand of RNA is produced. The nucleic acid need not be the entire sequence of the gene to be repressed, but typically will be substantially complementary to at least a portion of the sense strand of the gene to be repressed.

[0100] In another method, a nucleic acid can be transcribed into a ribozyme, or catalytic RNA, that affects expression of an mRNA. See, U.S. Pat. No. 6,423,885. Ribozymes can be designed to specifically pair with virtually any target RNA and cleave the phosphodiester backbone at a specific location, thereby functionally inactivating the target RNA. Heterologous nucleic acids can encode ribozymes designed to cleave particular mRNA transcripts, thus preventing expression of a polypeptide. Hammerhead ribozymes are useful for destroying particular mRNAs, although various ribozymes that cleave mRNA at site-specific recognition sequences can be used. Hammerhead ribozymes cleave mRNAs at locations dictated by flanking regions that form complementary base pairs with the target mRNA. The sole requirement is that the target RNA contains a 5′-UG-3′ nucleotide sequence. The construction and production of hammerhead ribozymes is known in the art. See, for example, U.S. Pat. No. 5,254,678 and WO 02/46449 and references cited therein. Hammerhead ribozyme sequences can be embedded in a stable RNA such as a transfer RNA (tRNA) to increase cleavage efficiency in vivo. Perriman et al., Proc. Natl. Acad. Sci. USA, 92(13):6175-6179 (1995); de Feyter and Gaudron, Methods in Molecular Biology, Vol. 74, Chapter 43, “Expressing Ribozymes in Plants”, Edited by Turner, P. C., Humana Press Inc., Totowa, N.J. RNA endoribonucleases which have been described, such as the one that occurs naturally in Tetrahymena thermophila, can be useful. See, for example, U.S. Pat. Nos. 4,987,071 and 6,423,885.

[0101] PTGS, e.g., RNAi, can also be used to inhibit the expression of a gene. For example, a construct can be prepared that includes a sequence that is transcribed into an RNA that can anneal to itself, e.g., a double stranded RNA having a stem-loop structure. In some embodiments, one strand of the stem portion of a double stranded RNA comprises a sequence that is similar or identical to the sense coding sequence or a fragment thereof of an aluminum tolerance-modulating polypeptide, and that is from about 10 nucleotides to about 2,500 nucleotides in length. The length of the sequence that is similar or identical to the sense coding sequence can be from 10 nucleotides to 500 nucleotides, from 15 nucleotides to 300 nucleotides, from 20 nucleotides to 100 nucleotides, or from 25 nucleotides to 100 nucleotides. The other strand of the stem portion of a double stranded RNA comprises a sequence that is similar or identical to the antisense strand or a fragment thereof of the coding sequence of the aluminum tolerance-modulating polypeptide, and can have a length that is shorter, the same as, or longer than the corresponding length of the sense sequence. In some cases, one strand of the stem portion of a double stranded RNA comprises a sequence that is similar or identical to the 3′ or 5′ untranslated region, or a fragment thereof, of an mRNA encoding an aluminum tolerance-modulating polypeptide, and the other strand of the stem portion of the double stranded RNA comprises a sequence that is similar or identical to the sequence that is complementary to the 3′ or 5′ untranslated region, respectively, or a fragment thereof, of the mRNA encoding the aluminum tolerance-modulating polypeptide. In other embodiments, one strand of the stem portion of a double stranded RNA comprises a sequence that is similar or identical to the sequence of an intron, or a fragment thereof, in the pre-mRNA encoding an aluminum tolerance-modulating polypeptide, and the other strand of the stem portion comprises a sequence that is similar or identical to the sequence that is complementary to the sequence of the intron, or a fragment thereof, in the pre-mRNA.

[0102] The loop portion of a double stranded RNA can be from 3 nucleotides to 5,000 nucleotides, e.g., from 3 nucleotides to 25 nucleotides, from 15 nucleotides to 1,000 nucleotides, from 20 nucleotides to 500 nucleotides, or from 25 nucleotides to 200 nucleotides. The loop portion of the RNA can include an intron or a fragment thereof. A double stranded RNA can have zero, one, two, three, four, five, six, seven, eight, nine, ten, or more stem-loop structures.

[0103] A construct including a sequence that is operably linked to a regulatory region and a transcription termination sequence, and that is transcribed into an RNA that can form a double stranded RNA, is transformed into plants as described herein. Methods for using RNAi to inhibit the expression of a gene are known to those of skill in the art. See, e.g., U.S. Pat. Nos. 5,034,323; 6,326,527; 6,452,067; 6,573,099; 6,753,139; and 6,777,588. See also WO 97/01952; WO 98/53083; WO 99/32619; WO 98/36083; and U.S. Patent Publications 20030175965, 20030175783, 20040214330, and 20030180945.

[0104] Constructs containing regulatory regions operably linked to nucleic acid molecules in sense orientation can also be used to inhibit the expression of a gene. The transcription product can be similar or identical to the sense coding sequence, or a fragment thereof, of an aluminum tolerance-modulating polypeptide. The transcription product also can be unpolyadenylated, lack a 5′ cap structure, or contain an unspliceable intron. Methods of inhibiting gene expression using a full-length cDNA as well as a partial cDNA sequence are known in the art. See, e.g., U.S. Pat. No. 5,231,020.

[0105] In some embodiments, a construct containing a nucleic acid having at least one strand that is a template for both sense and antisense sequences that are complementary to each other is used to inhibit the expression of a gene. The sense and antisense sequences can be part of a larger nucleic acid molecule or can be part of separate nucleic acid molecules having sequences that are not complementary. The sense or antisense sequence can be a sequence that is identical or complementary to the sequence of an mRNA, the 3′ or 5′ untranslated region of an mRNA, or an intron in a pre-mRNA encoding an aluminum tolerance-modulating polypeptide, or a fragment of such sequences. In some embodiments, the sense or antisense sequence is identical or complementary to a sequence of the regulatory region that drives transcription of the gene encoding an aluminum tolerance-modulating polypeptide. In each case, the sense sequence is the sequence that is complementary to the antisense sequence.

[0106] The sense and antisense sequences can be a length greater than about 10 nucleotides (e.g., 12, 13, 14, 15, 16, 17, 18, 19, 20, 21, 22, 23, 24, 25, 26, 27, 28, 29, 30, or more nucleotides). For example, an antisense sequence can be 21 or 22 nucleotides in length. Typically, the sense and antisense sequences range in length from about 15 nucleotides to about 30 nucleotides, e.g., from about 18 nucleotides to about 28 nucleotides, or from about 21 nucleotides to about 25 nucleotides.

[0107] In some embodiments, an antisense sequence is a sequence complementary to an mRNA sequence, or a fragment thereof, encoding an aluminum tolerance-modulating polypeptide described herein. The sense sequence complementary to the antisense sequence can be a sequence present within the mRNA of the aluminum tolerance-modulating polypeptide. Typically, sense and antisense sequences are designed to correspond to a 15-30 nucleotide sequence of a target mRNA such that the level of that target mRNA is reduced.

[0108] In some embodiments, a construct containing a nucleic acid having at least one strand that is a template for more than one sense sequence (e.g., 2, 3, 4, 5, 6, 7, 8, 9, 10 or more sense sequences) can be used to inhibit the expression of a gene. Likewise, a construct containing a nucleic acid having at least one strand that is a template for more than one antisense sequence (e.g., 2, 3, 4, 5, 6, 7, 8, 9, 10 or more antisense sequences) can be used to inhibit the expression of a gene. For example, a construct can contain a nucleic acid having at least one strand that is a template for two sense sequences and two antisense sequences. The multiple sense sequences can be identical or different, and the multiple antisense sequences can be identical or different. For example, a construct can have a nucleic acid having one strand that is a template for two identical sense sequences and two identical antisense sequences that are complementary to the two identical sense sequences. Alternatively, an isolated nucleic acid can have one strand that is a template for (1) two identical sense sequences 20 nucleotides in length, (2) one antisense sequence that is complementary to the two identical sense sequences 20 nucleotides in length, (3) a sense sequence 30 nucleotides in length, and (4) three identical antisense sequences that are complementary to the sense sequence 30 nucleotides in length. The constructs provided herein can be designed to have a suitable arrangement of sense and antisense sequences. For example, two identical sense sequences can be followed by two identical antisense sequences or can be positioned between two identical antisense sequences.

[0109] A nucleic acid having at least one strand that is a template for one or more sense and/or antisense sequences can be operably linked to a regulatory region to drive transcription of an RNA molecule containing the sense and/or antisense sequence(s). In addition, such a nucleic acid can be operably linked to a transcription terminator sequence, such as the terminator of the nopaline synthase (nos) gene. In some cases, two regulatory regions can direct transcription of two transcripts: one from the top strand, and one from the bottom strand. See, for example, Yan et al., Plant Physiol., 141:1508-1518 (2006). The two regulatory regions can be the same or different. The two transcripts can form double-stranded RNA molecules that induce degradation of the target RNA. In some cases, a nucleic acid can be positioned within a T-DNA or plant-derived transfer DNA (P-DNA) such that the left and right T-DNA border sequences or the left and right border-like sequences of the P-DNA flank, or are on either side of, the nucleic acid. See, U.S. Patent Publication No. 2006/0265788. The nucleic acid sequence between the two regulatory regions can be from about 15 to about 300 nucleotides in length. In some embodiments, the nucleic acid sequence between the two regulatory regions is from about 15 to about 200 nucleotides in length, from about 15 to about 100 nucleotides in length, from about 15 to about 50 nucleotides in length, from about 18 to about 50 nucleotides in length, from about 18 to about 40 nucleotides in length, from about 18 to about 30 nucleotides in length, or from about 18 to about 25 nucleotides in length.

[0110] In some nucleic-acid based methods for inhibition of gene expression in plants, a suitable nucleic acid can be a nucleic acid analog. Nucleic acid analogs can be modified at the base moiety, sugar moiety, or phosphate backbone to improve, for example, stability, hybridization, or solubility of the nucleic acid. Modifications at the base moiety include deoxyuridine for deoxythymidine, and 5-methyl-2′-deoxycytidine and 5-bromo-2′-deoxycytidine for deoxycytidine. Modifications of the sugar moiety include modification of the 2′ hydroxyl of the ribose sugar to form 2′-O-methyl or 2′-O-allyl sugars. The deoxyribose phosphate backbone can be modified to produce morpholino nucleic acids, in which each base moiety is linked to a six-membered morpholino ring, or peptide nucleic acids, in which the deoxyphosphate backbone is replaced by a pseudopeptide backbone and the four bases are retained. See, for example, Summerton and Weller, Antisense Nucleic Acid Drug Dev., 7:187-195 (1997); Hyrup et al., Bioorgan. Med. Chem., 4:5-23 (1996). In addition, the deoxyphosphate backbone can be replaced with, for example, a phosphorothioate or phosphorodithioate backbone, a phosphoroamidite, or an alkyl phosphotriester backbone.

[0111] C. Constructs/Vectors

[0112] Recombinant constructs provided herein can be used to transform plants or plant cells in order to modulate aluminum tolerance levels. A recombinant nucleic acid construct can comprise a nucleic acid encoding an aluminum tolerance-modulating polypeptide as described herein, operably linked to a regulatory region suitable for expressing the aluminum tolerance-modulating polypeptide in the plant or cell. Thus, a nucleic acid can comprise a coding sequence that encodes an aluminum tolerance-modulating polypeptide as set forth in SEQ ID NOs: 2, 3, 4, 5, 7, 8, 9, 10, 11, 12, 13, 14, 15, 17, 19, 20, 22, 24, 26, 28, 29, 31, 32, 33, 35, 36, 38, 40, 41, 42, 43, 44, 45, 47, 48, 49, 50, 52, 54, 55, 56, 57, 58, 59, 61, 63, 64, 65, 66, 67, 69, 70, 72, 73, 75, 77, 78, 79, 81, 82, 83, 84, 85, 86, 87, 88, 89, 90, 91, 93, 94, 96, 97, 98, 99, 100, 102, 103, 104, 105, 106, 107, 108, 109, 110, 111, 113, 115, 117, 119, 120, 121, 122, 124, 125, 126, 127, 129, 131, 132, 134, 136, 137, 138, 140, 142, 144, 146, 147, 148, 149, 150, 151, 152, 153, 154, 155, 156, 158, 159, 160, 162, 163, 164, 166, 167, 169, 171, 172, 173, 174, 175, 176, 177, 178, 179, 180, 181, 182, 183, 184, 185, 186, 187, 188, 190, 191, 192, 193, 194, 195, 197, 198, 199, 200, 201, 202, 203, 205, 207, 209, 211, 212, 213, 214, 215, 216, 217, 218, 219, 220, 221, 223, 224, 225, 227, 228, 229, 230, 231, 232, 233, 234, 235, 237, 239, 241, 243, 245, 246, 248, 250, 251, 253, 255, 257, 258, 259, 261, 263, 265, 267, 269, 271, 273, 274, 276, 278, 280, 281, 283, 284, 285, 287, 288, 290, 292, 293, 294, 296, 298, 300, 302, 304, 306, 308, 310, 312, 314, 316, 318, 320, 322, 324, 326, 328, 329, 331, 333, 335, 337, 338, 339, 341, 342, 343, 344, 345, 346, 347, 348, 349, 350, 351, 353, 355, 357, 358, 360, 362, 364, 366, 368, 369, 371, 373, 375, 376, 377, 378, 379, 380, 382, 384, 386, 388, 390, 392, 393, 395, 396, 397, 398, 399, 400, 401, 402, 404, 405, 407, 409, 411, 413, 414, 416, 418, 420, 421, 423, 424, 425, 426, 428, 429, 431, 432, 433, 434, 435, 436, 437, 438, 439, 440, 441, 442, 443, 444, 445, 446, 447, 449, 451, 453, 454, 456, 457, 458, 459, 460, 461, 462, 463, 465, 467, 468, 469, 470, 471, 472, 473, 474, 475, 476, 478, 480, 482, 484, 486, 488, 490, 492, 494, 496, 498, 500, 502, 504, 506, 508, 510, 512, 514, 516, 518, 520, 522, 524, 526, 528, 530, 532, 534, 535, 537, 539, 540, 542, 544, 545, 547, 549, 551, 553, 555, 557, 558, 560, 562, 564, 568, 570, 572, 574, 576, 578, 579, 580, 581, 583, 585, 587, 589, 591, 593, 595, 597, 599, 601, 603, 605, 607, 608, 610, 612, 614, 616, 618, 620, 622, 624, 625, 627, 629, 631, 633, 635, 637, 639, 641, 643, 645, 647, 649, 650, 651, 652, 653, 654, 655, 656,657, 658, 660, 662, 664, 666, 668, 669, 670, 671, 672, 673, 674, 675, 676, 677, 679, 681, 683, 685, 686, 687, 689, 691, 693, 695, 696, 698, 699, 701, 702, 703, 704, 705, 706, 707, 709, 710, 711, 712, 713, 714, 715, 716, 717, 718, 719, 721, 722, 723, 724, 725, 726, 727, 728, 729, 730, 731, 732, 733, 734, 735, 736, 737, 738, 739, 740, 742, 744, 745, 746, 747, 749, 750, 752, 753, 754, 755, 757, 759, 760, 761, 762, 764, 765, 766, 767, 768, 769, 770, 771, and 772. Examples of nucleic acids encoding aluminum tolerance-modulating polypeptides are set forth in SEQ ID NOs: 1, 6, 16, 18, 21, 23, 25, 27, 30, 34, 37, 39, 46, 51, 53, 60, 62, 68, 71, 74, 76, 80, 92, 95, 101, 112, 114, 116, 118, 123, 128, 130, 133, 135, 139, 141, 143, 145, 157, 161, 165, 168, 170, 189, 196, 204, 206, 208, 210, 222, 226, 236, 238, 240, 242, 244, 247, 249, 252, 254, 256, 260, 262, 264, 266, 268, 270, 272, 275, 277, 279, 282, 286, 289, 291, 295, 297, 299, 301, 303, 305, 307, 309, 311, 313, 315, 317, 319, 321, 323, 325, 327, 330, 332, 334, 336, 340, 352, 354, 356, 359, 361, 363, 365, 367, 370, 372, 374, 381, 383, 385, 387, 389, 391, 394, 403, 406, 408, 410, 412, 415, 417, 419, 422, 427, 430, 448, 450, 452, 455, 464, 466, 477, 479, 481, 483, 485, 487, 489, 491, 493, 495, 497, 499, 501, 503, 505, 507, 509, 511, 513, 515, 517, 519, 521, 523, 525, 527, 529, 531, 533, 536, 538, 541, 543, 546, 548, 550, 552, 554, 556, 559, 561, 563, 567, 569, 571, 573, 575, 577, 582, 584, 586, 588, 590, 592, 594, 596, 598, 600, 602, 604, 606, 609, 611, 613, 615, 617, 619, 621, 623, 626, 628, 630, 632, 634, 636, 638, 640, 642, 644, 646, 648, 659, 661, 663, 665, 667, 678, 680, 682, 684, 688, 690, 692, 694, 697, 700, 708, 720, 741, 743, 748, 751, 756, 758, and 763, or in the Sequence Listing. The aluminum tolerance-modulating polypeptide encoded by a recombinant nucleic acid can be a native aluminum tolerance-modulating polypeptide, or can be heterologous to the cell. In some cases, the recombinant construct contains a nucleic acid that inhibits expression of an aluminum tolerance-modulating polypeptide, operably linked to a regulatory region. Examples of suitable regulatory regions are described in the section entitled “Regulatory Regions.”

[0113] Vectors containing recombinant nucleic acid constructs such as those described herein also are provided. Suitable vector backbones include, for example, those routinely used in the art such as plasmids, viruses, artificial chromosomes, BACs, YACs, or PACs. Suitable expression vectors include, without limitation, plasmids and viral vectors derived from, for example, bacteriophage, baculoviruses, and retroviruses. Numerous vectors and expression systems are commercially available from such corporations as Novagen® (Madison, Wis.), Clontech® (Palo Alto, Calif.), Stratagene® (La Jolla, Calif.), and Invitrogen/Life Technologies® (Carlsbad, Calif.).

[0114] The vectors provided herein also can include, for example, origins of replication, scaffold attachment regions (SARs), and/or markers. A marker gene can confer a selectable phenotype on a plant cell. For example, a marker can confer biocide resistance, such as resistance to an antibiotic (e.g., kanamycin, G418, bleomycin, or hygromycin), or an herbicide (e.g., glyphosate, chlorsulfuron or phosphinothricin). In addition, an expression vector can include a tag sequence designed to facilitate manipulation or detection (e.g., purification or localization) of the expressed polypeptide. Tag sequences, such as luciferase, β-glucuronidase (GUS), green fluorescent protein (GFP), glutathione S-transferase (GST), polyhistidine, c-myc, hemagglutinin, or Flag™ tag (Kodak, New Haven, Conn.) sequences typically are expressed as a fusion with the encoded polypeptide. Such tags can be inserted anywhere within the polypeptide, including at either the carboxyl or amino terminus.

[0115] D. Regulatory Regions

[0116] The choice of regulatory regions to be included in a recombinant construct depends upon several factors, including, but not limited to, efficiency, selectability, inducibility, desired expression level, and cell- or tissue-preferential expression. It is a routine matter for one of skill in the art to modulate the expression of a coding sequence by appropriately selecting and positioning regulatory regions relative to the coding sequence. Transcription of a nucleic acid can be modulated in a similar manner.

[0117] Some suitable regulatory regions initiate transcription only, or predominantly, in certain cell types. Methods for identifying and characterizing regulatory regions in plant genomic DNA are known, including, for example, those described in the following references: Jordano et al., Plant Cell, 1:855-866 (1989); Bustos et al., Plant Cell, 1:839-854 (1989); Green et al., EMBO J., 7:4035-4044 (1988); Meier et al., Plant Cell, 3:309-316 (1991); and Zhang et al., Plant Physiology, 110:1069-1079 (1996).

[0118] Examples of various classes of regulatory regions are described below. Some of the regulatory regions indicated below as well as additional regulatory regions are described in more detail in U.S. patent application Ser. Nos. 60/505,689; 60/518,075; 60/544,771; 60/558,869; 60/583,691; 60/619,181; 60/637,140; 60/757,544; 60/776,307; 10/957,569; 11/058,689; 11/172,703; 11/208,308; 11/274,890; 60/583,609; 60/612,891; 11/097,589; 11/233,726; 11/408,791; 11/414,142; 10/950,321; 11/360,017; PCT/US05/011105; PCT/US05/23639; PCT/US05/034308; PCT/US05/034343; and PCT/US06/038236; PCT/US06/040572; PCT/US07/62762; PCT/US2009/032485; and PCT/US2009/038792.

[0119] For example, the sequences of regulatory regions p326, YP0144, YP0190, p13879, YP0050, p32449, 21876, YP0158, YP0214, YP0380, PT0848, PT0633, YP0128, YP0275, PT0660, PT0683, PT0758, PT0613, PT0672, PT0688, PT0837, YP0092, PT0676, PT0708, YP0396, YP0007, YP0111, YP0103, YP0028, YP0121, YP0008, YP0039, YP0115, YP0119, YP0120, YP0374, YP0101, YP0102, YP0110, YP0117, YP0137, YP0285, YP0212, YP0097, YP0107, YP0088, YP0143, YP0156, PT0650, PT0695, PT0723, PT0838, PT0879, PT0740, PT0535, PT0668, PT0886, PT0585, YP0381, YP0337, PT0710, YP0356, YP0385, YP0384, YP0286, YP0377, PD1367, PT0863, PT0829, PT0665, PT0678, YP0086, YP0188, YP0263, PT0743 and YP0096 are set forth in the sequence listing of PCT/US06/040572; the sequence of regulatory region PT0625 is set forth in the sequence listing of PCT/US05/034343; the sequences of regulatory regions PT0623, YP0388, YP0087, YP0093, YP0108, YP0022 and YP0080 are set forth in the sequence listing of U.S. patent application Ser. No. 11/172,703; the sequence of regulatory region PR0924 is set forth in the sequence listing of PCT/US07/62762; and the sequences of regulatory regions p530c10, pOsFIE2-2, pOsMEA, pOsYp102, and pOsYp285 are set forth in the sequence listing of PCT/US06/038236.

[0120] It will be appreciated that a regulatory region may meet criteria for one classification based on its activity in one plant species, and yet meet criteria for a different classification based on its activity in another plant species.

[0121] i. Broadly Expressing Promoters

[0122] A promoter can be said to be “broadly expressing” when it promotes transcription in many, but not necessarily all, plant tissues. For example, a broadly expressing promoter can promote transcription of an operably linked sequence in one or more of the shoot, shoot tip (apex), and leaves, but weakly or not at all in tissues such as roots or stems. As another example, a broadly expressing promoter can promote transcription of an operably linked sequence in one or more of the stem, shoot, shoot tip (apex), and leaves, but can promote transcription weakly or not at all in tissues such as reproductive tissues of flowers and developing seeds. Non-limiting examples of broadly expressing promoters that can be included in the nucleic acid constructs provided herein include the p326, YP0144, YP0190, p13879, YP0050, p32449, 21876, YP0158, YP0214, YP0380, PT0848, and PT0633 promoters. Additional examples include the cauliflower mosaic virus (CaMV) 35S promoter, the mannopine synthase (MAS) promoter, the 1′ or 2′ promoters derived from T-DNA of Agrobacterium tumefaciens, the figwort mosaic virus 34S promoter, actin promoters such as the rice actin promoter, and ubiquitin promoters such as the maize ubiquitin-1 promoter. In some cases, the CaMV 35S promoter is excluded from the category of broadly expressing promoters.

[0123] Another example of a broad promoter is the sequence of regulatory region PD3141 set forth in the sequence listing of PCT/US2009/032485. Therein, the expression pattern of the PD3141 regulatory region is described for TO rice plants overexpressing a construct comprising PD3141 driving expression of EGFP. In seedlings, expression was observed in: Tiller: not-specific; Main culm: not-specific; Root: not-specific; Leaf: not-specific; and Meristem: not-specific. In mature plants, expression was observed in: Main culm: bundle sheath, endodermis, epidermis, internode, ligule, node, pericycle, phloem, sclerenchyma layer, vasculature, xylem; Root: cortex, vascular; Panicle: flag leaf, ovary, peduncle, primary branch, rachilla, rachis, spiklet; Spiklet: flag leaf, floret (palea), lemma, ovule, pedicle, pollen, seed, stigma; Leaf: epidermis, leaf blade, leaf sheath, mesophyll; and Meristem: floral meristem, shoot apical meristem, vegetative meristem.

[0124] Another example of a broad promoter is the sequence of regulatory region p326 set forth in the sequence listing of U.S. application Ser. No. 10/981,334. Therein, the expression pattern of the p326 regulatory region is described for Arabidopsis plants. p326 expressed throughout most mature tissues screened. Expression was somewhat higher in epidermal, vascular and photosynthetic tissue of seedling. Lines characterized went through several generations.

[0125] Another example of a broad promoter is the sequence of regulatory region PD2995 (a 600 bp version of p326) set forth in the sequence listing of PCT/US2009/32485. In TO rice plants, PD2995 expresses very weakly throughout all tissues of the plant in both seedling and mature stages. Strongest expression detected in root tissue and embryo.

[0126] ii. Root Promoters

[0127] Root-active promoters confer transcription in root tissue, e.g., root endodermis, root epidermis, or root vascular tissues. In some embodiments, root-active promoters are root-preferential promoters, i.e., confer transcription only or predominantly in root tissue. Root-preferential promoters include the YP0128, YP0275, PT0625, PT0660, PT0683, and PT0758 promoters. Other root-preferential promoters include the PT0613, PT0672, PT0688, and PT0837 promoters, which drive transcription primarily in root tissue and to a lesser extent in ovules and/or seeds. Other examples of root-preferential promoters include the root-specific subdomains of the CaMV 35S promoter (Lam et al., Proc. Natl. Acad. Sci. USA, 86:7890-7894 (1989)), root cell specific promoters reported by Conkling et al., Plant Physiol., 93:1203-1211 (1990), and the tobacco RD2 promoter.

[0128] Another example of a root promoter is the sequence of regulatory region PD3561 set forth in the sequence listing of PCT/US2009/038792. Therein, the expression pattern of the PD3561 regulatory region is described for TO rice plants overexpressing a construct comprising PD3561 driving expression of EGFP. Expression was observed in roots of seedlings in the cortex, epidermis, and vascular tissues. In mature plants, expression was observed strongly throughout the root with the exception of the root cap and in the cortex, epidermis, and vascular tissues.

[0129] iii. Maturing Endosperm Promoters

[0130] In some embodiments, promoters that drive transcription in maturing endosperm can be useful. Transcription from a maturing endosperm promoter typically begins after fertilization and occurs primarily in endosperm tissue during seed development and is typically highest during the cellularization phase. Most suitable are promoters that are active predominantly in maturing endosperm, although promoters that are also active in other tissues can sometimes be used. Non-limiting examples of maturing endosperm promoters that can be included in the nucleic acid constructs provided herein include the napin promoter, the Arcelin-5 promoter, the phaseolin promoter (Bustos et al., Plant Cell, 1(9):839-853 (1989)), the soybean trypsin inhibitor promoter (Riggs et al., Plant Cell, 1(6):609-621 (1989)), the ACP promoter (Baerson et al., Plant Mol. Biol., 22(2):255-267 (1993)), the stearoyl-ACP desaturase promoter (Slocombe et al., Plant Physiol., 104(4):167-176 (1994)), the soybean α′ subunit of β-conglycinin promoter (Chen et al., Proc. Natl. Acad. Sci. USA, 83:8560-8564 (1986)), the oleosin promoter (Hong et al., Plant Mol. Biol., 34(3):549-555 (1997)), and zein promoters, such as the 15 kD zein promoter, the 16 kD zein promoter, 19 kD zein promoter, 22 kD zein promoter and 27 kD zein promoter. Also suitable are the Osgt-1 promoter from the rice glutelin-1 gene (Zheng et al., Mol. Cell Biol., 13:5829-5842 (1993)), the beta-amylase promoter, and the barley hordein promoter. Other maturing endosperm promoters include the YP0092, PT0676, and PT0708 promoters.

[0131] iv. Ovary Tissue Promoters

[0132] Promoters that are active in ovary tissues such as the ovule wall and mesocarp can also be useful, e.g., a polygalacturonidase promoter, the banana TRX promoter, the melon actin promoter, YP0396, and PT0623. Examples of promoters that are active primarily in ovules include YP0007, YP0111, YP0092, YP0103, YP0028, YP0121, YP0008, YP0039, YP0115, YP0119, YP0120, and YP0374.

[0133] v. Embryo Sac/Early Endosperm Promoters

[0134] To achieve expression in embryo sac/early endosperm, regulatory regions can be used that are active in polar nuclei and/or the central cell, or in precursors to polar nuclei, but not in egg cells or precursors to egg cells. Most suitable are promoters that drive expression only or predominantly in polar nuclei or precursors thereto and/or the central cell. A pattern of transcription that extends from polar nuclei into early endosperm development can also be found with embryo sac/early endosperm-preferential promoters, although transcription typically decreases significantly in later endosperm development during and after the cellularization phase. Expression in the zygote or developing embryo typically is not present with embryo sac/early endosperm promoters.

[0135] Promoters that may be suitable include those derived from the following genes: Arabidopsis viviparous-1 (see, GenBank No. U93215); Arabidopsis atmycl (see, Urao, Plant Mol. Biol., 32:571-57 (1996); Conceicao, Plant, 5:493-505 (1994)); Arabidopsis FIE (GenBank No. AF129516); Arabidopsis MEA; Arabidopsis FIS2 (GenBank No. AF096096); and FIE 1.1 (U.S. Pat. No. 6,906,244). Other promoters that may be suitable include those derived from the following genes: maize MAC1 (see, Sheridan, Genetics, 142:1009-1020 (1996)); maize Cat3 (see, GenBank No. L05934; Abler, Plant Mol. Biol., 22:10131-1038 (1993)). Other promoters include the following Arabidopsis promoters: YP0039, YP0101, YP0102, YP0110, YP0117, YP0119, YP0137, DME, YP0285, and YP0212. Other promoters that may be useful include the following rice promoters: p530c10, pOsFIE2-2, pOsMEA, pOsYp102, and pOsYp285.

[0136] vi. Embryo Promoters

[0137] Regulatory regions that preferentially drive transcription in zygotic cells following fertilization can provide embryo-preferential expression. Most suitable are promoters that preferentially drive transcription in early stage embryos prior to the heart stage, but expression in late stage and maturing embryos is also suitable. Embryo-preferential promoters include the barley lipid transfer protein (Ltp1) promoter (Plant Cell Rep 20:647-654 (2001)), YP0097, YP0107, YP0088, YP0143, YP0156, PT0650, PT0695, PT0723, PT0838, PT0879, and PT0740.

[0138] vii. Photosynthetic Tissue Promoters

[0139] Promoters active in photosynthetic tissue confer transcription in green tissues such as leaves and stems. Most suitable are promoters that drive expression only or predominantly in such tissues. Examples of such promoters include the ribulose-1,5-bisphosphate carboxylase (RbcS) promoters such as the RbcS promoter from eastern larch (Larix laricina), the pine cab6 promoter (Yamamoto et al., Plant Cell Physiol., 35:773-778 (1994)), the Cab-1 promoter from wheat (Fejes et al., Plant Mol. Biol., 15:921-932 (1990)), the CAB-1 promoter from spinach (Lubberstedt et al., Plant Physiol., 104:997-1006 (1994)), the cablR promoter from rice (Luan et al., Plant Cell, 4:971-981 (1992)), the pyruvate orthophosphate dikinase (PPDK) promoter from corn (Matsuoka et al., Proc. Natl. Acad. Sci. USA, 90:9586-9590 (1993)), the tobacco Lhcb1*2 promoter (Cerdan et al., Plant Mol. Biol., 33:245-255 (1997)), the Arabidopsis thaliana SUC2 sucrose-H+ symporter promoter (Truernit et al., Planta, 196:564-570 (1995)), and thylakoid membrane protein promoters from spinach (psaD, psaF, psaE, PC, FNR, atpC, atpD, cab, rbcS). Other photosynthetic tissue promoters include PT0535, PT0668, PT0886, YP0144, YP0380 and PT0585.

[0140] viii. Vascular Tissue Promoters

[0141] Examples of promoters that have high or preferential activity in vascular bundles include YP0087, YP0093, YP0108, YP0022, and YP0080. Other vascular tissue-preferential promoters include the glycine-rich cell wall protein GRP 1.8 promoter (Keller and Baumgartner, Plant Cell, 3(10):1051-1061 (1991)), the Commelina yellow mottle virus (CoYMV) promoter (Medberry et al., Plant Cell, 4(2):185-192 (1992)), and the rice tungro bacilliform virus (RTBV) promoter (Dai et al., Proc. Natl. Acad. Sci. USA, 101(2):687-692 (2004)).

[0142] ix. Inducible Promoters

[0143] Inducible promoters confer transcription in response to external stimuli such as chemical agents or environmental stimuli. For example, inducible promoters can confer transcription in response to hormones such as giberellic acid or ethylene, or in response to light or drought. Examples of drought-inducible promoters include YP0380, PT0848, YP0381, YP0337, PT0633, YP0374, PT0710, YP0356, YP0385, YP0396, YP0388, YP0384, PT0688, YP0286, YP0377, PD1367, and PD0901. Examples of nitrogen-inducible promoters include PT0863, PT0829, PT0665, and PT0886. Examples of shade-inducible promoters include PR0924 and PT0678. An example of a promoter induced by salt is rd29A (Kasuga et al. (1999) Nature Biotech 17: 287-291).

[0144] x. Basal Promoters

[0145] A basal promoter is the minimal sequence necessary for assembly of a transcription complex required for transcription initiation. Basal promoters frequently include a “TATA box” element that may be located between about 15 and about 35 nucleotides upstream from the site of transcription initiation. Basal promoters also may include a “CCAAT box” element (typically the sequence CCAAT) and/or a GGGCG sequence, which can be located between about 40 and about 200 nucleotides, typically about 60 to about 120 nucleotides, upstream from the transcription start site.

[0146] xi. Stem Promoters

[0147] A stem promoter may be specific to one or more stem tissues or specific to stem and other plant parts. Stem promoters may have high or preferential activity in, for example, epidermis and cortex, vascular cambium, procambium, or xylem. Examples of stem promoters include YP0018 which is disclosed in US20060015970 and CryIA(b) and CryIA(c) (Braga et al. 2003, Journal of New Seeds 5:209-221).

[0148] xii. Other Promoters

[0149] Other classes of promoters include, but are not limited to, shoot-preferential, callus-preferential, trichome cell-preferential, guard cell-preferential such as PT0678, tuber-preferential, parenchyma cell-preferential, and senescence-preferential promoters. Promoters designated YP0086, YP0188, YP0263, PT0758, PT0743, PT0829, YP0119, and YP0096, as described in the above-referenced patent applications, may also be useful.

[0150] xiii. Other Regulatory Regions

[0151] A 5′ untranslated region (UTR) can be included in nucleic acid constructs described herein. A 5′ UTR is transcribed, but is not translated, and lies between the start site of the transcript and the translation initiation codon and may include the +1 nucleotide. A 3′ UTR can be positioned between the translation termination codon and the end of the transcript. UTRs can have particular functions such as increasing mRNA stability or attenuating translation. Examples of 3′ UTRs include, but are not limited to, polyadenylation signals and transcription termination sequences, e.g., a nopaline synthase termination sequence.

[0152] It will be understood that more than one regulatory region may be present in a recombinant polynucleotide, e.g., introns, enhancers, upstream activation regions, transcription terminators, and inducible elements. Thus, for example, more than one regulatory region can be operably linked to the sequence of a polynucleotide encoding an aluminum tolerance-modulating polypeptide.

[0153] Regulatory regions, such as promoters for endogenous genes, can be obtained by chemical synthesis or by subcloning from a genomic DNA that includes such a regulatory region. A nucleic acid comprising such a regulatory region can also include flanking sequences that contain restriction enzyme sites that facilitate subsequent manipulation.

### IV. TRANSGENIC PLANTS AND PLANT CELLS

[0154] A. Transformation

[0155] The invention also features transgenic plant cells and plants comprising at least one recombinant nucleic acid construct described herein. A plant or plant cell can be transformed by having a construct integrated into its genome, i.e., can be stably transformed. Stably transformed cells typically retain the introduced nucleic acid with each cell division. A plant or plant cell can also be transiently transformed such that the construct is not integrated into its genome. Transiently transformed cells typically lose all or some portion of the introduced nucleic acid construct with each cell division such that the introduced nucleic acid cannot be detected in daughter cells after a sufficient number of cell divisions. Both transiently transformed and stably transformed transgenic plants and plant cells can be useful in the methods described herein.

[0156] Transgenic plant cells used in methods described herein can constitute part or all of a whole plant. Such plants can be grown in a manner suitable for the species under consideration, either in a growth chamber, a greenhouse, or in a field. Transgenic plants can be bred as desired for a particular purpose, e.g., to introduce a recombinant nucleic acid into other lines, to transfer a recombinant nucleic acid to other species, or for further selection of other desirable traits. Alternatively, transgenic plants can be propagated vegetatively for those species amenable to such techniques. As used herein, a transgenic plant also refers to progeny of an initial transgenic plant provided the progeny inherits the transgene. Seeds produced by a transgenic plant can be grown and then selfed (or outcrossed and selfed) to obtain seeds homozygous for the nucleic acid construct.

[0157] Transgenic plants can be grown in suspension culture, or tissue or organ culture. For the purposes of this invention, solid and/or liquid tissue culture techniques can be used. When using solid medium, transgenic plant cells can be placed directly onto the medium or can be placed onto a filter that is then placed in contact with the medium. When using liquid medium, transgenic plant cells can be placed onto a flotation device, e.g., a porous membrane that contacts the liquid medium. A solid medium can be, for example, Murashige and Skoog (MS) medium containing agar and a suitable concentration of an auxin, e.g., 2,4-dichlorophenoxyacetic acid (2,4-D), and a suitable concentration of a cytokinin, e.g., kinetin.

[0158] When transiently transformed plant cells are used, a reporter sequence encoding a reporter polypeptide having a reporter activity can be included in the transformation procedure and an assay for reporter activity or expression can be performed at a suitable time after transformation. A suitable time for conducting the assay typically is about 1-21 days after transformation, e.g., about 1-14 days, about 1-7 days, or about 1-3 days. The use of transient assays is particularly convenient for rapid analysis in different species, or to confirm expression of a heterologous aluminum tolerance-modulating polypeptide whose expression has not previously been confirmed in particular recipient cells.

[0159] Techniques for introducing nucleic acids into monocotyledonous and dicotyledonous plants are known in the art, and include, without limitation, Agrobacterium-mediated transformation, viral vector-mediated transformation, electroporation and particle gun transformation, e.g., U.S. Pat. Nos. 5,538,880; 5,204,253; 6,329,571 and 6,013,863. If a cell or cultured tissue is used as the recipient tissue for transformation, plants can be regenerated from transformed cultures if desired, by techniques known to those skilled in the art.

[0160] B. Screening/Selection

[0161] A population of transgenic plants can be screened and/or selected for those members of the population that have a trait or phenotype conferred by expression of the transgene. For example, a population of progeny of a single transformation event can be screened for those plants having a desired level of expression of an aluminum tolerance-modulating polypeptide or nucleic acid. In some embodiments, a population of plants can be selected that has increased tolerance to elevated levels of Al³⁺ in soil without increased tolerance to drought or elevated saline levels. Plant species vary in their capacity to tolerate salinity. “Salinity” refers to a set of environmental conditions under which a plant will begin to suffer the effects of elevated salt concentration, such as ion imbalance, decreased stomatal conductance, decreased photosynthesis, decreased growth rate, increased cell death, loss of turgor (wilting), or ovule abortion. For these reasons, plants experiencing salinity stress typically exhibit a significant reduction in biomass and/or yield.

[0162] Physical and biochemical methods can be used to identify expression levels. These include Southern analysis or PCR amplification for detection of a polynucleotide; Northern blots, S1 RNase protection, primer-extension, or RT-PCR amplification for detecting RNA transcripts; enzymatic assays for detecting enzyme or ribozyme activity of polypeptides and polynucleotides; and protein gel electrophoresis, Western blots, immunoprecipitation, and enzyme-linked immunoassays to detect polypeptides. Other techniques such as in situ hybridization, enzyme staining, and immunostaining also can be used to detect the presence or expression of polypeptides and/or polynucleotides. Methods for performing all of the referenced techniques are known. As an alternative, a population of plants comprising independent transformation events can be screened for those plants having a desired trait, such as increased tolerance to elevated levels of aluminum. Selection and/or screening can be carried out over one or more generations, and/or in more than one geographic location. In some cases, transgenic plants can be grown and selected under conditions which induce a desired phenotype or are otherwise necessary to produce a desired phenotype in a transgenic plant. In addition, selection and/or screening can be applied during a particular developmental stage in which the phenotype is expected to be exhibited by the plant. Selection and/or screening can be carried out to choose those transgenic plants having a statistically significant difference in an aluminum tolerance level relative to a control plant that lacks the transgene. Selected or screened transgenic plants have an altered phenotype as compared to a corresponding control plant, as described in the “Transgenic Plant Phenotypes” section herein.

[0163] C. Plant Species

[0164] The polynucleotides and vectors described herein can be used to transform a number of monocotyledonous and dicotyledonous plants and plant cell systems, including species from one of the following families: Acanthaceae, Alliaceae, Alstroemeriaceae, Anaryllidaceae, Apocynaceae, Arecaceae, Asteraceae, Berberidaceae, Bixaceae, Brassicaceae, Bromeliaceae, Cannabaceae, Caryophyllaceae, Cephalotaxaceae, Chenopodiaceae, Colchicaceae, Cucurbitaceae, Dioscoreaceae, Ephedraceae, Erythroxylaceae, Euphorbiaceae, Fabaceae, Lamiaceae, Linaceae, Lycopodiaceae, Malvaceae, Melanthiaceae, Musaceae, Myrtaceae, Nyssaceae, Papaveraceae, Pinaceae, Plantaginaceae, Poaceae, Rosaceae, Rubiaceae, Salicaceae, Sapindaceae, Solanaceae, Taxaceae, Theaceae, or Vitaceae.

[0165] Suitable species may include members of the genus Abelmoschus, Abies, Acer, Agrostis, Allium, Alstroemeria, Ananas, Andrographis, Andropogon, Artemisia, Arundo, Atropa, Berberis, Beta, Bixa, Brassica, Calendula, Camellia, Camptotheca, Cannabis, Capsicum, Carthamus, Catharanthus, Cephalotaxus, Chrysanthemum, Cinchona, Citrullus, Coffea, Colchicum, Coleus, Cucumis, Cucurbita, Cynodon, Datura, Dianthus, Digitalis, Dioscorea, Elaeis, Ephedra, Erianthus, Erythroxvlum, Eucalvptus, Festuca, Fragaria, Galanthus, Glycine, Gossypium, Helianthus, Hevea, Hordeum, Hyoscyamus, Jatropha, Lactuca, Linum, Lolium, Lupinus, Lycopersicon, Lycopodium, Manihot, Medicago, Mentha, Miscanthus, Musa, Nicotiana, Oryza, Panicum, Papaver, Parthenium, Pennisetum, Petunia, Phalaris, Phleum, Pinus, Poa, Poinsettia, Populus, Rauwolfia, Ricinus, Rosa, Saccharum, Salix, Sanguinaria, Scopolia, Secale, Solanum, Sorghum, Spartina, Spinacea, Tanacetum, Taxus, Theobroma, Triticosecale, Triticum, Uniola, Veratrum, Vinca, Vitis, and Zea.

[0166] Suitable species include Panicum spp., Sorghum spp., Miscanthus spp., Saccharum spp., Erianthus spp., Populus spp., Andropogon gerardii (big bluestem), Pennisetum purpureum (elephant grass), Phalaris arundinacea (reed canarygrass), Cynodon dactylon (bermudagrass), Festuca arundinacea (tall fescue), Spartina pectinata (prairie cord-grass), Medicago sativa (alfalfa), Arundo donax (giant reed), Secale cereale (rye), Salix spp. (willow), Eucalyptus spp. (eucalyptus), Triticosecale (triticum—wheat X rye) and bamboo.

[0167] Suitable species also include Helianthus annuus (sunflower), Carthamus tinctorius (safflower), Jatropha curcas (jatropha), Ricinus communis (castor), Elaeis guineensis (palm), Linum usitatissimum (flax), and Brassica juncea.

[0168] Suitable species also include Beta vulgaris (sugarbeet), and Manihot esculenta (cassava)

[0169] Suitable species also include Lycopersicon esculentum (tomato), Lactuca sativa (lettuce), Musa paradisiaca (banana), Solanum tuberosum (potato), Brassica oleracea (broccoli, cauliflower, Brussels sprouts), Camellia sinensis (tea), Fragaria ananassa (strawberry), Theobroma cacao (cocoa), Coffea arabica (coffee), Vitis vinifera (grape), Ananas comosus (pineapple), Capsicum annum (hot & sweet pepper), Allium cepa (onion), Cucumis melo (melon), Cucumis sativus (cucumber), Cucurbita maxima (squash), Cucurbita moschata (squash), Spinacea oleracea (spinach), Citrullus lanatus (watermelon), Abelmoschus esculentus (okra), and Solanum melongena (eggplant).

[0170] Suitable species also include Papaver somniferum (opium poppy), Papaver orientale, Taxus baccata, Taxus brevifolia, Artemisia annua, Cannabis sativa, Camptotheca acuminate, Catharanthus roseus, Vinca rosea, Cinchona officinalis, Colchicum autumnale, Veratrum californica, Digitalis lanata, Digitalis purpurea, Dioscorea spp., Andrographis paniculata, Atropa belladonna, Datura stomonium, Berberis spp., Cephalotaxus spp., Ephedra sinica, Ephedra spp., Erythroxylum coca, Galanthus wornorii, Scopolia spp., Lycopodium serratum (Huperzia serrata), Lycopodium spp., Rauwolfia serpentina, Rauwolfia spp., Sanguinaria canadensis, Hvoscyamus spp., Calendula officinalis, Chrysanthemum parthenium, Coleus forskohlii, and Tanacetum parthenium.

[0171] Suitable species also include Parthenium argentatum (guayule), Hevea spp. (rubber), Mentha spicata (mint), Mentha piperita (mint), Bixa orellana, and Alstroemeria spp.

[0172] Suitable species also include Rosa spp. (rose), Dianthus caryophyllus (carnation), Petunia spp. (petunia) and Poinsettia pulcherrima (poinsettia).

[0173] Suitable species also include Nicotiana tabacum (tobacco), Lupinus albus (lupin), Uniola paniculata (oats), bentgrass (Agrostis spp.), Populus tremuloides (aspen), Pinus spp. (pine), Abies spp. (fir), Acer spp. (maple), Hordeum vulgare (barley), Poa pratensis (bluegrass), Lolium spp. (ryegrass) and Phleum pratense (timothy).

[0174] In some embodiments, a suitable species can be a wild, weedy, or cultivated Pennisetum species such as, but not limited to, Pennisetum alopecuroides, Pennisetum arnhemicum, Pennisetum caffrum, Pennisetum clandestinum, Pennisetum divisum, Pennisetum glaucum, Pennisetum latifolium, Pennisetum macrostachyum, Pennisetum macrourum, Pennisetum orientale, Pennisetum pedicellatum, Pennisetum polystachion, Pennisetum polystachion ssp. Setosum, Pennisetum purpureum, Pennisetum setaceum, Pennisetum subangustum, Pennisetum typhoides, Pennisetum villosum, or hybrids thereof (e.g., Pennisetum purpureum x Pennisetum typhoidum).

[0175] In some embodiments, a suitable species can be a wild, weedy, or cultivated Miscanthus species and/or variety such as, but not limited to, Miscanthus x giganteus, Miscanthus sinensis, Miscanthus x ogiformis, Miscanthus floridulus, Miscanthus transmorrisonensis, Miscanthus oligostachyus, Miscanthus nepalensis, Miscanthus sacchariflorus, Miscanthus x giganteus ‘Amuri’, Miscanthus x giganteus ‘Nagara’, Miscanthus x giganteus ‘Illinois’, Miscanthus sinensis var. ‘Goliath’, Miscanthus sinensis var. ‘Roland’, Miscanthus sinensis var. ‘Africa’, Miscanthus sinensis var. ‘Fern Osten’, Miscanthus sinensis var. gracillimus, Miscanthus sinensis var. variegates, Miscanthus sinensis var. purpurascens, Miscanthus sinensis var. ‘Malepartus’, Miscanthus sacchariflorus var. ‘Robusta’, Miscanthus sinensis var. ‘Silberfedher’ (aka. Silver Feather), Miscanthus transmorrisonensis, Miscanthus condensatus, Miscanthus yakushimanum, Miscanthus var. ‘Alexander’, Miscanthus var. ‘Adagio’, Miscanthus var. ‘Autumn Light’, Miscanthus var. ‘Cabaret’, Miscanthus var. ‘Condensatus’, Miscanthus var. ‘Cosmopolitan’, Miscanthus var. ‘Dixieland’, Miscanthus var. ‘Gilded Tower’ (U.S. Pat. No. 14,743), Miscanthus var. ‘Gold Bar’ (U.S. Pat. No. 15,193), Miscanthus var. ‘Gracillimus’, Miscanthus var. ‘Graziella’, Miscanthus var. ‘Grosse Fontaine’, Miscanthus var. ‘Hinjo aka Little Nicky’™, Miscanthus var. ‘Juli’, Miscanthus var. ‘Kaskade’, Miscanthus var. ‘Kirk Alexander’, Miscanthus var. ‘Kleine Fontaine’, Miscanthus var. ‘Kleine Silberspinne’ (aka. ‘Little Silver Spider’), Miscanthus var. ‘Little Kitten’, Miscanthus var. ‘Little Zebra’ (U.S. Pat. No. 13,008), Miscanthus var. ‘Lottum’, Miscanthus var. ‘Malepartus’, Miscanthus var. ‘Morning Light’, Miscanthus var. ‘Mysterious Maiden’ (U.S. Pat. No. 16,176), Miscanthus var. ‘Nippon’, Miscanthus var. ‘November Sunset’, Miscanthus var. ‘Parachute’, Miscanthus var. ‘Positano’, Miscanthus var. ‘Puenktchen’(aka ‘Little Dot’), Miscanthus var. ‘Rigoletto’, Miscanthus var. ‘Sarabande’, Miscanthus var. ‘Silberpfeil’ (aka. Silver Arrow), Miscanthus var. ‘Silverstripe’, Miscanthus var. ‘Super Stripe’ (U.S. Pat. No. 18,161), Miscanthus var. ‘Strictus’, or Miscanthus var. ‘Zebrinus’.

[0176] In some embodiments, a suitable species can be a wild, weedy, or cultivated sorghum species and/or variety such as, but not limited to, Sorghum almum, Sorghum amplum, Sorghum angustum, Sorghum arundinaceum, Sorghum bicolor (such as bicolor, guinea, caudatum, kafir, and durra), Sorghum brachypodum, Sorghum bulbosum, Sorghum burmahicum, Sorghum controversum, Sorghum drummondii, Sorghum ecarinatum, Sorghum exstans, Sorghum grande, Sorghum halepense, Sorghum interjectum, Sorghum intrans, Sorghum laxiflorum, Sorghum leiocladum, Sorghum macrospermum, Sorghum matarankense, Sorghum miliaceum, Sorghum nigrum, Sorghum nitidum, Sorghum plumosum, Sorghum propinquum, Sorghum purpureosericeum, Sorghum stipoideum, Sorghum sudanensese, Sorghum timorense, Sorghum trichocladum, Sorghum versicolor, Sorghum virgatum, Sorghum vulgare, or hybrids such as Sorghum x almum, Sorghum x sudangrass or Sorghum x drummondii.

[0177] Thus, the methods and compositions can be used over a broad range of plant species, including species from the dicot genera Brassica, Carthamus, Glycine, Gossypium, Helianthus, Jatropha, Parthenium, Populus, and Ricinus; and the monocot genera Elaeis, Festuca, Hordeum, Lolium, Oryza, Panicum, Pennisetum, Phleum, Poa, Saccharum, Secale, Sorghum, Triticosecale, Triticum, and Zea. In some embodiments, a plant is a member of the species Panicum virgatum (switchgrass), Sorghum bicolor (sorghum, sudangrass), Miscanthus giganteus (miscanthus), Saccharum sp. (energycane), Populus balsamifera (poplar), Zea mays (corn), Glycine max (soybean), Brassica napus (canola), Triticum aestivum (wheat), Gossypium hirsutum (cotton), Oryza sativa (rice), Helianthus annuus (sunflower), Medicago sativa (alfalfa), Beta vulgaris (sugarbeet), or Pennisetum glaucum (pearl millet).

[0178] In certain embodiments, the polynucleotides and vectors described herein can be used to transform a number of monocotyledonous and dicotyledonous plants and plant cell systems, wherein such plants are hybrids of different species or varieties of a specific species (e.g., Saccharum sp. X Miscanthus sp., Sorghum sp. X Miscanthus sp., e.g., Panicum virgatum x Panicum amarum, Panicum virgatum x Panicum amarulum, and Pennisetum purpureum x Pennisetum typhoidum).

[0179] D. Transgenic Plant Phenotypes

[0180] In some embodiments, a plant expressing an aluminum tolerance-modulating polypeptide can have increased levels of aluminum tolerance in plants. The aluminum tolerance level can be increased by at least 2 percent, e.g., 2, 3, 4, 5, 6, 7, 8, 9, 10, 11, 12, 13, 14, 15, 16, 17, 18, 19, 20, 25, 30, 35, 40, 45, 50, 55, 60, or more than 60 percent, as compared to the aluminum tolerance level in a corresponding control plant that does not express the transgene. As described above, aluminum tolerance can be assessed by monitoring root growth or plant height in acidic soils containing elevated levels of Al³⁺.

[0181] A plant in which expression of an aluminum tolerance-modulating polypeptide is modulated can have increased or decreased levels of seed production. The level can be increased or decreased by at least 2 percent, e.g., 2, 3, 4, 5, 10, 15, 20, 25, 30, 35, or more than 35 percent, as compared to the seed production level in a corresponding control plant that does not express the transgene. Increases in seed production can provide improved nutritional availability in geographic locales where intake of plant foods is often insufficient, or for biofuel production.

[0182] Typically, a difference in the amount of aluminum tolerance (e.g., as measured by root growth or plant height) in a transgenic plant relative to a control plant is considered statistically significant at p≤0.05 with an appropriate parametric or non-parametric statistic, e.g., Chi-square test, Student's t-test, Mann-Whitney test, or F-test. In some embodiments, a difference in the amount of aluminum tolerance is statistically significant at p<0.01, p<0.005, or p<0.001. A statistically significant difference in, for example, the amount of aluminum tolerance in a transgenic plant compared to the amount of a control plant indicates that the recombinant nucleic acid present in the transgenic plant results in altered aluminum tolerance levels.

[0183] The phenotype of a transgenic plant is evaluated relative to a control plant. A plant is said “not to express” a polypeptide when the plant exhibits less than 10%, e.g., less than 9%, 8%, 7%, 6%, 5%, 4%, 3%, 2%, 1%, 0.5%, 0.1%, 0.01%, or 0.001%, of the amount of polypeptide or mRNA encoding the polypeptide exhibited by the plant of interest. Expression can be evaluated using methods including, for example, RT-PCR, Northern blots, S1 RNase protection, primer extensions, Western blots, protein gel electrophoresis, immunoprecipitation, enzyme-linked immunoassays, chip assays, and mass spectrometry. It should be noted that if a polypeptide is expressed under the control of a tissue-preferential or broadly expressing promoter, expression can be evaluated in the entire plant or in a selected tissue. Similarly, if a polypeptide is expressed at a particular time, e.g., at a particular time in development or upon induction, expression can be evaluated selectively at a desired time period.

### V. MODIFYING ENDOGENOUS NUCLEIC ACIDS ENCODING ALUMINUM TOLERANCE-MODULATING POLYPEPTIDES

[0184] This document also features plant cells and plants in which an endogenous aluminum tolerance-modulating nucleic acid described herein has been modified (e.g., a regulatory region, intron, or coding region of the aluminum tolerance-modulating nucleic acid has been modified). The aluminum tolerance of such plants is altered relative to the corresponding level of a control plant in which the endogenous nucleic acid is not modified. Such plants are referred to herein as modified plants and may be used to produce, for example, increased amounts of aluminum tolerance.

[0185] Endogenous nucleic acid can be modified by homologous recombination techniques. For example, sequence specific endonucleases (e.g., zinc finger nucleases (ZFNs)) and meganucleases can be used to stimulate homologous recombination at endogenous plant genes. See, e.g., Townsend et al., Nature 459:442-445 (2009); Tovkach et al., Plant J., 57:747-757 (2009); and Lloyd et al., Proc. Natl. Acad. Sci. USA, 102:2232-2237 (2005). In particular, ZFNs engineered to create DNA double strand breaks at specific loci can be used to make targeted sequence changes in endogenous plant genes. For example, an endogenous plant gene can be replaced with a variant containing one or more mutations (e.g., produced using site-directed mutagenesis or directed evolution). In some embodiments, site directed mutagenesis is achieved via non-homologous end joining such that after breaking DNA, endogenous DNA repair mechanisms ligate the break, often introducing slight deletions or additions that can be screened at the cell or plant level for desired phenotypes. Moore and Haber, Mol Cell Biol., 16(5):2164-73 (1996).

[0186] In some embodiments, endogenous nucleic acids can be modified by methylation or demethylation such that the expression of the modified endogenous nucleic acid is altered. For example, a double stranded RNA can be used to activate gene expression by targeting noncoding regulatory regions in gene promoters. See Shibuya et al., Proc Natl Acad Sci USA, 106(5): 1660-1665 (2009); and Li et al., Proc Natl Acad Sci USA, 103(46):17337-42 (2006). In some embodiments, ZFNs engineered to create DNA double strand breaks at specific loci can be used to insert a DNA fragment having at least one region that overlaps with the endogenous DNA to facilitate homologous recombination, such that the non-overlapping portion of the DNA fragment is integrated at the break site. For example, a fragment can be inserted into an endogenous promoter and/or regulatory region at a specific site where a ZFN creates a double stranded break to alter the expression of an endogenous gene. For example, a fragment that is inserted into an endogenous gene coding region at a specific site where a ZFN creates a double stranded break can result in expression of a chimeric gene. For example, a fragment that functions as a regulator region or promoter that is inserted into an endogenous DNA region immediately upstream of a gene coding sequence at a specific site where a ZFN creates a double stranded break can result in altered expression of the endogenous gene.

[0187] In some embodiments, endogenous nucleic acids can be modified using activation tagging. For example, a vector containing multiple copies of an enhancer element from the constitutively active promoter of the cauliflower mosaic virus (CaMV) 35S gene can be used to activate an endogenous gene. See, Weigel et al., Plant Physiology, 122:1003-1013 (2000).

[0188] In some embodiments, endogenous nucleic acids can be modified by introducing an engineered transcription activation/repression factor (e.g., zinc finger protein transcription factor, or ZFP TF. See, for example, the world wide web at sangamo.com/tech/tech_plat_over.html#whatarezfp). For example, a synthetic transcription facto sequence of a zinc finger DNA binding domain and a VP16 activation domain can be designed to bind to a specific endogenous DNA site and alter expression of an endogenous gene. An engineered transcription activation/repression factor (such as ZFP TF) can activate, repress, or switch the target endogenous aluminum tolerance gene expression by binding specifically to the promoter region or coding region of the endogenous gene. Engineered nucleases that cleave specific DNA sequences in vivo can also be valuable reagents for targeted mutagenesis. One such class of sequence-specific nucleases can be created by fusing transcription activator-like effectors (TALEs) to the catalytic domain of the FokI endonuclease. Both native and custom TALE-nuclease fusions direct DNA double-strand breaks to specific, targeted sites. Christian et al., Genetics 186: 757-761 (2010).

[0189] In some embodiments, endogenous nucleic acids can be modified by mutagenesis. Genetic mutations can be introduced within regenerable plant tissue using one or more mutagenic agents. Suitable mutagenic agents include, for example, ethyl methane sulfonate (EMS), N-nitroso-N-ethylurea (ENU), methyl N-nitrosoguanidine (MNNG), ethidium bromide, diepoxybutane, ionizing radiation, x-rays, UV rays and other mutagens known in the art. Suitable types of mutations include, for example, insertions or deletions of nucleotides, and transitions or transversions in the endogenous nucleic acid sequence. In one embodiment, TILLING (Targeted Induced Local Lesions In Genomes) can be used to produce plants having a modified endogenous nucleic acid. TILLING combines high-density mutagenesis with high-throughput screening methods. See, for example, McCallum et al., Nat Biotechnol 18: 455-457 (2000); reviewed by Stemple, Nat Rev Genet 5(2):145-50 (2004).

[0190] In some embodiments, an endogenous nucleic acid can be modified via a gene silencing technique. See, for example, the section herein regarding “Inhibition of Expression of an aluminum tolerance-Modulating Polypeptide.”

[0191] A population of plants can be screened and/or selected for those members of the population that have a modified nucleic acid. A population of plants also can be screened and/or selected for those members of the population that have a trait or phenotype conferred by expression of the modified nucleic acid. As an alternative, a population of plants can be screened for those plants having a desired trait, such as a modulated level of aluminum tolerance. For example, a population of progeny can be screened for those plants having a desired level of expression of an aluminum tolerance-modulating polypeptide or nucleic acid. Physical and biochemical methods can be used to identify modified nucleic acids and/or expression levels as described with transgenic plants. Selection and/or screening can be carried out over one or more generations, and/or in more than one geographic location. In some cases, plants can be grown and selected under conditions which induce a desired phenotype or are otherwise necessary to produce a desired phenotype in a modified plant. In addition, selection and/or screening can be applied during a particular developmental stage in which the phenotype is expected to be exhibited by the plant. Selection and/or screening can be carried out to choose those modified plants having a statistically significant difference in an aluminum tolerance level relative to a control plant in which the nucleic acid has not been modified. Selected or screened modified plants have an altered phenotype as compared to a corresponding control plant, as described in the “Transgenic Plant Phenotypes” section herein.

[0192] Although a plant or plant cell in which an endogenous aluminum tolerance-modulating nucleic acid has been modified is not transgenic for that particular nucleic acid, it will be appreciated that such a plant or cell may contain transgenes. For example, a modified plant can contain a transgene for other traits, such as herbicide tolerance or insect resistance. As another example, a modified plant can contain one or more transgenes that, in conjunction with modifications of one or more endogenous nucleic acids, exhibits an increase in aluminum tolerance.

[0193] As with transgenic plant cells, modified plant cells can constitute part or all of a whole plant. Such plants can be grown in the same manner as described for transgenic plants and can be bred or propagated in the same manner as described for transgenic plants.

### VI. PLANT BREEDING

[0194] Genetic polymorphisms that are useful in such methods include simple sequence repeats (SSRs, or microsatellites), rapid amplification of polymorphic DNA (RAPDs), single nucleotide polymorphisms (SNPs), amplified fragment length polymorphisms (AFLPs) and restriction fragment length polymorphisms (RFLPs). SSR polymorphisms can be identified, for example, by making sequence specific probes and amplifying template DNA from individuals in the population of interest by PCR. For example, PCR techniques can be used to enzymatically amplify a genetic marker associated with a nucleotide sequence conferring a specific trait (e.g., nucleotide sequences described herein). PCR can be used to amplify specific sequences from DNA as well as RNA, including sequences from total genomic DNA or total cellular RNA. When using RNA as a source of template, reverse transcriptase can be used to synthesize complementary DNA (cDNA) strands. Various PCR methods are described, for example, in PCR Primer: A Laboratory Manual, Dieffenbach and Dveksler, eds., Cold Spring Harbor Laboratory Press, 1995.

[0195] Generally, sequence information from polynucleotides flanking the region of interest or beyond is employed to design oligonucleotide primers that are identical or similar in sequence to opposite strands of the template to be amplified. Primers are typically 14 to 40 nucleotides in length, but can range from 10 nucleotides to hundreds of nucleotides in length. Template and amplified DNA is repeatedly denatured at a high temperature to separate the double strand, then cooled to allow annealing of primers and the extension of nucleotide sequences through the microsatellite, resulting in sufficient DNA for detection of PCR products. If the probes flank an SSR in the population, PCR products of different sizes will be produced. See, e.g., U.S. Pat. No. 5,766,847.

[0196] PCR products can be qualitative or quantitatively analyzed using several techniques. For example, PCR products can be stained with a fluorescent molecule (e.g., PicoGreen® or OliGreen®) and detected in solution using spectrophotometry or capillary electrophoresis. In some cases, PCR products can be separated in a gel matrix (e.g., agarose or polyacrylamide) by electrophoresis, and size-fractionated bands comprising PCR products can be visualized using nucleic acid stains. Suitable stains can fluoresce under UV light (e.g., Ethidium bromide, GR Safe, SYBR® Green, or SYBR® Gold). The results can be visualized via transillumination or epi-illumination, and an image of the fluorescent pattern can be acquired using a camera or scanner, for example. The image can be processed and analyzed using specialized software (e.g., ImageJ) to measure and compare the intensity of a band of interest against a standard loaded on the same gel.

[0197] Alternatively, SSR polymorphisms can be identified by using PCR product(s) as a probe against Southern blots from different individuals in the population. See, U. H. Refseth et al., (1997) Electrophoresis 18: 1519. Briefly, PCR products are separated by length through gel electrophoresis and transferred to a membrane. SSR-specific DNA probes, such as oligonucleotides labeled with radioactive, fluorescent, or chromogenic molecules, are applied to the membrane and hybridize to bound PCR products with a complementary nucleotide sequence. The pattern of hybridization can be visualized by autoradiography or by development of color on the membrane, for example.

[0198] In some cases, PCR products can be quantified using a real-time thermocycler detection system. For example, Quantitative real-time PCR can use a fluorescent dye that forms a DNA-dye-complex (e.g., SYBR® Green), or a fluorophore-containing DNA probe, such as single-stranded oligonucleotides covalently bound to a fluorescent reporter or fluorophore (e.g. 6-carboxyfluorescein or tetrachlorofluorescin) and quencher (e.g., tetramethylrhodamine or dihydrocyclopyrroloindole tripeptide minor groove binder). The fluorescent signal allows detection of the amplified product in real time, thereby indicating the presence of a sequence of interest, and allowing quantification of the copy number of a sequence of interest in cellular DNA or expression level of a sequence of interest from cellular mRNA.

[0199] The identification of RFLPs is discussed, for example, in Alonso-Blanco et al. (Methods in Molecular Biology, vol. 82, “Arabidopsis Protocols”, pp. 137-146, J. M. Martinez-Zapater and J. Salinas, eds., c. 1998 by Humana Press, Totowa, N.J.); Burr (“Mapping Genes with Recombinant Inbreds”, pp. 249-254, in Freeling, M. and V. Walbot (Ed.), The Maize Handbook, c. 1994 by Springer-Verlag New York, Inc.: New York, N.Y., USA; Berlin Germany; Burr et al. Genetics (1998) 118: 519; and Gardiner, J. et al., (1993) Genetics 134: 917). For example, to produce a RFLP library enriched with single- or low-copy expressed sequences, total DNA can be digested with a methylation-sensitive enzyme (e.g., PstI). The digested DNA can be separated by size on a preparative gel. Polynucleotide fragments (500 to 2000 bp) can be excised, eluted and cloned into a plasmid vector (e.g., pUC18). Southern blots of plasmid digests can be probed with total sheared DNA to select clones that hybridize to single- and low-copy sequences. Additional restriction endonucleases can be tested to increase the number of polymorphisms detected.

[0200] The identification of AFLPs is discussed, for example, in EP 0 534 858 and U.S. Pat. No. 5,878,215. In general, total cellular DNA is digested with one or more restriction enzymes. Restriction halfsite-specific adapters are ligated to all restriction fragments and the fragments are selectively amplified with two PCR primers that have corresponding adaptor and restriction site specific sequences. The PCR products can be visualized after size-fractionation, as described above.

[0201] In some embodiments, the methods are directed to breeding a plant line. Such methods use genetic polymorphisms identified as described above in a marker assisted breeding program to facilitate the development of lines that have a desired alteration in the aluminum tolerance trait. Once a suitable genetic polymorphism is identified as being associated with variation for the trait, one or more individual plants are identified that possess the polymorphic allele correlated with the desired variation. Those plants are then used in a breeding program to combine the polymorphic allele with a plurality of other alleles at other loci that are correlated with the desired variation. Techniques suitable for use in a plant breeding program are known in the art and include, without limitation, backcrossing, mass selection, pedigree breeding, bulk selection, crossing to another population and recurrent selection. These techniques can be used alone or in combination with one or more other techniques in a breeding program. Thus, each identified plants is selfed or crossed a different plant to produce seed which is then germinated to form progeny plants. At least one such progeny plant is then selfed or crossed with a different plant to form a subsequent progeny generation. The breeding program can repeat the steps of selfing or outcrossing for an additional 0 to 5 generations as appropriate in order to achieve the desired uniformity and stability in the resulting plant line, which retains the polymorphic allele. In most breeding programs, analysis for the particular polymorphic allele will be carried out in each generation, although analysis can be carried out in alternate generations if desired.

[0202] In some cases, selection for other useful traits is also carried out, e.g., selection for fungal resistance or bacterial resistance. Selection for such other traits can be carried out before, during or after identification of individual plants that possess the desired polymorphic allele.

### VII. ARTICLES OF MANUFACTURE

[0203] Transgenic plants provided herein have various uses in the agricultural and energy production industries. For example, transgenic plants described herein can be used to make animal feed and food products. Such plants, however, are often particularly useful as a feedstock for energy production.

[0204] Transgenic plants described herein produce higher yields of grain and/or biomass per hectare, relative to control plants that lack the exogenous nucleic acid or lack the modified endogenous nucleic acid when grown on soils with a pH less than 5 and elevated aluminum levels. For example, transgenic plants described herein can have a grain yield that is increased about 5% to about 20% (e.g., increased 5% to 10%, 5% to 15%, 10% to 15%, 10% to 20%, or 15% to 20%) relative to that of control plants lacking the exogenous nucleic acid or lacking the modified endogenous nucleic acid. In some embodiments, such transgenic plants provide equivalent or even increased yields of grain and/or biomass per hectare relative to control plants when grown under conditions of reduced inputs such as fertilizer and/or water. Thus, such transgenic plants can be used to provide yield stability at a lower input cost and/or under environmentally stressful conditions such as low pH and elevated aluminum levels.

[0205] In some embodiments, plants described herein have a composition that permits more efficient processing into free sugars, and subsequently ethanol, for energy production. In some embodiments, such plants provide higher yields of ethanol, butanol, dimethyl ether, other biofuel molecules, and/or sugar-derived co-products per kilogram of plant material, relative to control plants. Such processing efficiencies are believed to be derived from the composition of the plant material, including, but not limited to, content of glucan, cellulose, hemicellulose, and lignin. By providing higher yields at an equivalent or even decreased cost of production, the transgenic plants described herein improve profitability for farmers and processors as well as decrease costs to consumers.

[0206] Seeds from transgenic plants described herein can be conditioned and bagged in packaging material by means known in the art to form an article of manufacture. Packaging material such as paper and cloth are well known in the art. A package of seed can have a label, e.g., a tag or label secured to the packaging material, a label printed on the packaging material, or a label inserted within the package, that describes the nature of the seeds therein.

[0207] The invention will be further described in the following examples, which do not limit the scope of the invention described in the claims.

### VIII. EXAMPLES

### Example 1—Materials and Methods

[0208] Plant agar culture media lacking phosphate were prepared in 2 L Pyrex glass bottles and contained the following per 1 L: 0.78 g/L of ½×MS without KH₂PO₄ (Sigma Chemical Co., St. Louis, Mo.), 0.5 g/L MES (Sigma Chemical Co.) and 7 g/L of 0.7% Phytagar (EM Science, Gibbstown, N.J.). Media were stirred for 30 minutes after the addition of ½ MS. The pH after the MS was completely dissolved was close to pH 5.7, and adjusted using KOH. The final pH of each batch was measured due to pH variability between batches. Media preparations were autoclaved at about 121° C. for 25 minutes on a liquid setting. Approximately 40 mL of media were added to each square plate (100×100×15 mm) in a laminar flow hood using a liquid dispensing device or 50 mL sterile pipette. The plates were immediately covered with lids to avoid contamination. Plates were allowed to cool in a laminar flow hood for at least 1 hour, but not more than 3 hours, with a blower on. Plates were stored in 4° C. in bags.

[0209] Liquid media lacking phosphate for use in Al⁺³ assays were prepared in 2 L Pyrex glass bottles and contained per 1 L: 0.78 g/L of MS salt without KH₂PO₄ (Sigma Chemical Co.), 0.5 g/L MES (Sigma Chemical Co.), and 6 mL of 0.1M AlCl₃ (Sigma Chemical Co.) (600 μM AlCl₃ and predicted Al⁺³ activity of 160 μM). Media were stirred for 30 minutes while the pH was adjusted slowly to pH 4.0 using 1N HCL. AlCl₃ was added after autoclaving. The preparations were autoclaved at about 121° C. for 25 minutes on a liquid setting.

[0210] Agar buffer media lacking phosphate, for use in Al⁺³ assays, were prepared in 2 L Pyrex glass bottles and contained per 1 L: 0.78 g/L of MS salt without KH₂PO₄ (Sigma Chemical Co.), 0.5 g/L MES (Sigma Chemical Co.), and 4 g/L Phytagar (EM Science), with 1N HCL used to adjust to a pH of 4.8. The media were stirred for 30 minutes after the addition Phytagar and 1 N HCL. The final pH of each batch was recorded due to pH variability between batches. The media preparations were autoclaved at about 121° C. for 25 minutes on liquid setting. Approximately 20 mL of warm agar containing Al⁺³ media were aliquoted to each of 10 horizontal wells within each hydroponic box (10 horizontal wells per box/10 seeds per horizontal well) using a 50 mL sterile pipette and allowed to solidify for about 2 hours before layering 10 mL of cooled liquid Al⁺³ media on top over the agar media described above. A thin layer of the liquid media floated on and was suspended over the agar solidified media lacking phosphate and containing Al⁺³. The hydroponic boxes were immediately covered with lids to avoid contamination and evaporation of the liquid layer before Al⁺³ infiltrations into the solid agar layer. The hydroponic boxes were allowed to rest in the laminar flow hood for at least 1 hour, but not more than 3 hours, with a blower on (to avoid evaporation of the liquid layer during infiltration). The hydroponic boxes were stored in 4° C.

[0211] To sterilize seeds, the appropriate number of seeds from each candidate plant or ME line event were transferred to individual 2 mL tubes and 1 mL 30% Clorox bleach was added to each tube and agitated manually for at least 5 minutes until all seeds become suspended. Bleach solution then was discarded and seeds were rinsed aseptically with sterile nanopure water at least 4 times or until the seeds were thoroughly rinsed.

### Example 2 Al⁺³ Assay for Transgenic Arabidopsis thaliana

[0212] Forty-eight T₃ generation seeds of each of transgenic ME02064 events-01, -04, -03, plus an empty vector control (SR00559), were sterilized and plated on agar media lacking phosphate hydroponically suspended over Al⁺³ liquid media (see Example 1). In each mini-hydroponic box, 48 control seeds plus 48 ME02064 seeds were sown. Boxes were kept in a 4° C. refrigerator in the dark for 3 days to promote uniform germination. After 3 days of cold treatment, the boxes were placed horizontally in a Conviron growth chamber as described above. The plates were scanned using a fluorescence imager scanner (Technologica Ltd, Colchester, UK) at 7 days and 14 days after sowing seeds. Plants were scored for growth when Al⁺³ toxicity (e.g., stunted root growth and reduced rosette area) became apparent, usually around 10 days.

[0213] The seedling area and fluorescence intensity (Fv/Fm) were quantified in a pooled manner. Fv/Fm measurements as well as rosette area growth for each individual plant were not taken. Rather, the -01, -04, & -03 seedling populations (48 seedlings) were compared to the pooled control (48 seedlings) within the same mini-hydroponic box.

[0214] Total rosette growth was measured for 48 seedlings from transgenic lines and for 48 seedlings from control lines. Stress that resulted in decreases in the quantum efficiency of photochemistry (open PSII reaction centers), determined by Fv/Fm of dark adapted plants, was considered an indicator of inhibition of photosynthesis by Al⁺³. Basta resistance was not tested as other assays had indicated that these lines were transgenic.

[0215] Rosette area was larger at 10 days in all transgenic events of -01, -04, & -03 when compared to empty vector controls (SR00559) as shown in Table 1. However, no visual difference in root growth was observed (data not shown). Roots for both transgenics and controls were all severely stunted, failing to penetrate from the agar media support into the high Al⁺³ liquid media. The mean Fv/Fm appeared to be moderately higher in transgenic events-01, -04, & -03 relative to controls, but there was no statistically significant difference.

TABLE 1

| 60 μM AlCl₃ 10 days | ME02064-01T3 | SR00559 |
|---|---|---|
| Sum of Rosette Areas (mm²) | 587.74 | 478.23 |
| Mean Fv/Fm | 0.722 | 0.713 |
| 60 μM AlCl₃ 10 days | ME02064-04T3 | SR00559 |
| Sum of Rosette Areas (mm²) | 676.19 | 619.3 |
| Mean Fv/Fm | 0.775 | 0.763 |
| 60 μM AlCl₃ 10 days | ME02064-03T3 | SR00559 |
| Sum of Rosette Areas (mm²) | 578.23 | 436.96 |
| Mean Fv/Fm | 0.712 | 0.717 |

### Example 3 Al⁺³ Assay for Transgenic Switchgrass Plants

[0216] A T-DNA binary vector containing Ceres Clone 375578 (SEQ ID NO:352) was introduced into switchgrass by Agrobacterium-mediated transformation essentially as described in Richards et al., Plant Cell. Rep. 20:48-54 (2001) and Somleva, et al., Crop Sci. 42:2080-2087 (2002). The presence of the transgene was confirmed by PCR. Plants comprising the transgene were grown in acidified soil containing high levels of Al⁺³. The soil was made by dissolving AlCl₃ in water and watering the soil with the aluminized water. The soil then was acidified using pH 4 buffered water, to release the toxic aluminum ion. Because the acidity of the soil determines how much of the Al³⁺ is present as the toxic free ion, the Al³⁺ value was variable. Switchgrass control non-transgenic plants (Wt) and transgenic (CeresClone 375578) plants were placed in soil in separate pots in a growth room and allowed to grow under standard growth room conditions. Non-transgenic plants were generated from calli without co-cultivation with agrobacteria. There was one plant per pot. The plantlets were watered with one of the following three treatments: Treatment 1: 2 L of water, pH 7.26; Treatment 2: 2 L of water, pH 4.0; and Treatment 3: 2 L of water, pH 4.0+˜11 g/Kg soil Al³⁺ (˜621 μM). The size of the transgenics and controls appeared similar when the treatment was started but no measurements were taken. After 16 days, seedlings were harvested, washed, and then dried in a drying oven. The dry weight biomass was measured for each plant.

[0217] Transgenic aerial plant growth was greater in the transgenic switchgrass events than in the controls as indicated by an increase in whole plant weight (shoots and roots). The increase was statistically significant at a P value of 0.05 when compared to wild-type plants (see FIG. 5, Tables 2 and 3). Root growth in the transgenic lines was visually more robust than wild-type controls. These results indicate that switchgrass containing Ceres Clone 375578 can survive in acidified soil having an aluminum chloride concentration of about 11 g/kg soil.

TABLE 2
Whole Plant Weight (Shoots + Roots)

| | Treatment 1 | | Treatment 2 | | Treatment 3 | |
|---|---|---|---|---|---|---|
| | Wt | 375578 | Wt | 375578 | Wt | 375578 |
| Mean Weight | 1.23 | 1.4 | 1.33 | 1.39 | 0.73 | 1.44 |
| (g) | | | | | | |
| Standard Error | 0.23 | 0.17 | 0.07 | 0.07 | 0.23 | 0.13 |
| Median | 1 | 1.3 | 1.2 | 1.3 | 0.8 | 1.25 |
| Standard | 0.40 | 0.55 | 0.12 | 0.23 | 0.40 | 0.42 |
| Deviation | | | | | | |
| Sample | 0.16 | 0.3 | 0.01 | 0.05 | 0.16 | 0.18 |
| Variance | | | | | | |
| Skewness | 1.73 | 0.30 | −1.73 | 0.35 | 0.72 | 1.04 |
| Range | 0.7 | 1.4 | 0.2 | 0.6 | 0.8 | 1.3 |
| Minimum | 1 | 0.8 | 1 | 1.1 | 0.3 | 1 |
| Maximum | 1.7 | 2.2 | 1.2 | 1.7 | 1.1 | 2.3 |
| Sum | 3.7 | 14 | 3.4 | 13.9 | 2.2 | 14.4 |
| Count | 3 | 10 | 3 | 10 | 3 | 10 |

TABLE 3
t-Test: Two-Sample Assuming Unequal
Variances of Plants under Treatment 3

| | Wild type | |
|---|---|---|
| | Control, pH 4 | 375578 |
| Mean Whole Plant Weight (Shoots + Roots) (g) | 0.73 | 1.44 |
| Variance | 0.16 | 0.18 |
| Observations | 3 | 10 |
| Hypothesized Mean Difference | 0 | |
| Df | 3 | |
| t Stat | −2.63 | |
| P (T <= t) one-tail | 0.04 | |
| t Critical one-tail | 2.35 | |
| P (T <= t) two-tail | 0.08 | |
| t Critical two-tail | 3.18 | |

[0218] The results also indicate that wild type plants watered with Treatment 3 (pH 4 but without AlCl₃) had a whole plant weight that was less than the whole plant dry weight of wild type plants watered with Treatment 3. The results also indicate that the decrease in whole plant dry weight seen under Treatment 3 conditions was a result of Al⁺³ toxicity, because wild-type plants grown under Treatment 2 conditions (pH 4 but without AlCl₃) showed no such decrease in whole plant dry weight (see Table 3).

### Example 4—Germination of Rice Seedlings in Media Containing Aluminum

[0219] In this example, the role of CeresClone 24255 (Os713, 3 events), CeresClone 1752915 (Os825, 3 events), and CeresClone 11684 (Os879, 3 events) was assessed in rice seeds germinated in the presence of aluminum. Seeds of wild-type internal control (null segregant) and homozygous transgenic plants were placed on two separate plates for each event. Each plate had two rows of 12 seeds aligned in parallel. External wild-type seed were sown at the same time under control (no aluminum chloride) conditions using the same format for comparison of rate of germination and growth to that of Al⁺³ conditions.

[0220] Unsterilized, de-husked seeds were germinated under normal or aluminum-stress conditions as follows. Normal conditions included a plate (150 mm×100 mm×15 mm) containing 30 mL of ½ MS medium without phosphate and nitrogen, no sugar, 4 g agar/L pH 5.7. Aluminum-stress conditions included a plate (150 mm×100 mm×15 mm) containing 20 mL of 2 MS medium without phosphate and nitrogen, no sugar, 4 g agar/L pH 5.7, infiltrated with 10 mL AlCl₃ liquid infiltration medium containing 600 μM AlCl₃ (which corresponds to a predicted ion activity of 160 μM on plates) in %2 MS pH 4. The AlCl₃ liquid infiltration medium was added on top of the aluminum medium and allowed to settle for 24 hours before seed placement on the surface. AlCl₃ liquid infiltration medium consisted of: %2 MS media without phosphate or nitrogen; no sugar or agar; and 600 μM AlCl₃, with the pH adjusted to 4.0 with 1N HC. Predicted Al⁺³ activities were confirmed with GEOCHEM-EZ, a multi-purpose chemical speciation program. See, Shaff et al., Plant Soil 330: 207-214 (2010).

[0221] Plates with lids were not sealed but were placed inside large ziplock bags to maintain humidity in growth chamber (25° C., 70% humidity for 8 hours light/16 hours dark). At 13 days, seedlings were measured for plant height and root length. See Tables 4 and 5. For Os713, plant height and root length were not significantly different between the transgenic plants and non-transgenic controls. For Os825 event 9, a significant increase in plant height was observed in comparison to the pooled non-transgenic control. For Os879 event 7, a significant increase in plant height was observed in comparison to the internal non-transgenic control. For Os879 event 4, a significant increase in plant height was observed in comparison to the internal non-transgenic control as well as a significant increase in root length in comparison to the pooled non-transgenic control. For Os870 event 8, a significant increase in root length was observed in comparison to the internal and pooled non-transgenic controls.

TABLE 4
Plant Height after 13 d Aluminum Treatment

| | Copy | #of | Transgenics | | | Non-transgenics | | | P-value | |
|---|---|---|---|---|---|---|---|---|---|---|
| | number of | plants | | Standard | #r of | | Standard | # of | Internal | Pooled |
| Genotype | transgene | tested | Average | Deviation | plants | Average | Deviation | plants | NT | NT |
| OS713-07 | 1 | 24 | 5.11 | 5.01 | 12 | 6.73 | 4.27 | 12 | 0.41 | 0.74 |
| OS713-05 | 1 | 24 | 2.92 | 4.47 | 12 | 1.91 | 2.62 | 12 | 0.50 | 0.22 |
| OS713-03 | 1 | 24 | 6.42 | 5.63 | 12 | 5.21 | 3.43 | 12 | 0.53 | 0.23 |
| All OS713 | | | 4.81 | 5.13 | 36 | 4.62 | 3.97 | 36 | 0.86 | |
| OS825-13 | 1 | 24 | 3.89 | 5.15 | 12 | 2.09 | 2.55 | 12 | 0.28 | 0.61 |
| OS825-10 | 1 | 24 | 3.95 | 4.26 | 12 | 3.15 | 4.43 | 12 | 0.66 | 0.56 |
| OS825-09 | 1 | 24 | 5.95 | 4.95 | 12 | 4.28 | 4.36 | 12 | 0.39 | 0.05 |
| All OS825 | | | 4.60 | 4.76 | 36 | 3.17 | 3.88 | 36 | 0.23 | |
| OS879-08 | 1 | 24 | 5.23 | 4.34 | 12 | 2.88 | 3.96 | 12 | 0.18 | 0.10 |
| OS879-07 | 1 | 24 | 4.88 | 4.50 | 12 | 1.28 | 2.81 | 12 | 0.03 | 0.18 |
| OS879-04 | 1 | 24 | 5.72 | 4.63 | 12 | 5.03 | 3.73 | 12 | 0.69 | 0.05 |
| All OS879 | | | 5.27 | 4.38 | 36 | 3.07 | 3.77 | 36 | 0.02 | |

TABLE 5
Root Length after 13 d Aluminum Treatment

| | Number | Transgenics | | | Non-transgenics | | | P-value | |
|---|---|---|---|---|---|---|---|---|---|
| | of plants | | Standard | Number | | Standard | Number | Internal | Pooled |
| Genotype | tested | Average | Deviation | of plants | Average | Deviation | of plants | NT | NT |
| OS713-07 | 24 | 0.79 | 0.83 | 12 | 1.5 | 0.87 | 12 | 0.059 | 0.97 |
| OS713-05 | 24 | 0.75 | 1.08 | 12 | 0.2 | 0.36 | 12 | 0.11 | 0.87 |
| OS713-03 | 24 | 1.2 | 1.08 | 12 | 0.7 | 0.50 | 12 | 0.16 | 0.18 |
| | | 0.92 | 1.00 | 36 | 0.8 | 0.81 | 36 | 0.59 | |
| OS825-13 | 24 | 0.38 | 0.64 | 12 | 0.28 | 0.47 | 12 | 0.67 | 0.42 |
| OS825-10 | 24 | 0.38 | 0.87 | 12 | 0.73 | 1.12 | 12 | 0.41 | 0.46 |
| OS825-09 | 24 | 0.58 | 0.51 | 12 | 0.79 | 0.84 | 12 | 0.47 | 0.96 |
| | | 0.45 | 0.68 | 36 | 0.60 | 0.86 | 36 | 0.35 | |
| OS879-08 | 24 | 0.85 | 0.72 | 12 | 0.29 | 0.45 | 12 | 0.03 | 0.005 |
| OS879-07 | 24 | 0.53 | 0.59 | 12 | 0.16 | 0.37 | 12 | 0.08 | 0.23 |
| OS879-04 | 24 | 0.94 | 0.78 | 12 | 0.57 | 0.42 | 12 | 0.16 | 0.002 |
| | | 0.78 | 0.71 | 36 | 0.34 | 0.44 | 36 | 0.002 | |

### Example 5—Seedling Growth of Transgenic Rice Containing CeresClone 375578, CeresClone 24255, and CeresClone 11684 in Rice

[0222] The experiments described in Example 4 were repeated using transgenic rice events for CeresClone 375578 (Line 745282, one of 7 events), CeresClone 24255 (Os713, 3 events), and CeresClone 11684 (Os879, 3 events). After germination under normal or aluminum conditions as described in Example 4, and incubation for 10 or 11 days in the growth chamber, surviving seedlings were transplanted to soil (60% Sunshine Professional Mix (with vermiculite); 40% Turface; 1 tbs/3 L Osmocote; 1.5 tbs/3 L of Bone Meal; and 0.5 tbs/3 L Marathon).

[0223] Plants were genotyped as follows. Plants were allowed to recover until the two leaf stage then genotyped by cutting 5 to 6 mm leaf segments from the largest of the two leaves and placed onto Kanamycin medium plates containing 160 mg/L of Kanamycin (¼ MS basal salt medium; 4.5 g/L of Phytoagar; 100 μL/L of Tween 80; and adjusted to pH 5.7 with 1N KOH. Medium was sterilized under the wet cycle for 30 minutes at 120° C. and allowed to cool before adding Kanamcyin to a final concentration of 160 mg/L). Plates were sealed in Ziplock bags and placed in a growth chamber at about 26±2° C. under normal growing light regime (16 h light and 8 h dark).

[0224] Plates were removed from the chamber during a light period and scanned starting at 4 d of treatment. If unclear, the plates were re-scanned at 5 or 6 days post treatment. Plates were scanned for photosynthetic efficiency (PE) quantification to determine genotype. Generally, PE is a parameter (Fv/Fm, the ratio of variable florescence over the maximum florescence value) used to indicate the quantum efficiency of the photosystem type II (PSII) reactions within the plants chloroplasts. The Fv/Fm parameter is an indication of photosynthetic tissue health. Healthy tissue samples typically achieve an Fv/Fm value of approximately 0.7-0.85. Lower values are observed if a sample is exposed to a biotic or abiotic stress factor that reduce the capacity for photochemical quenching of energy within PSII.

[0225] Images of chlorophyll fluorescence and the florescence parameters were obtained with Chlorophyll Fluorescence imager (Technologica, UK) using the manufacturer's instructions for light-adapted materials. Representative regions of the image, e.g., distant from the any cut end to avoid damage effects, were chosen for reading the Fv/Fm values. PCR analysis was used to confirm the presence of transgenes.

[0226] After genotyping, plants were grown in soil and treated with either water (Normal) or with acidified water (˜pH 4.0) containing 600 μM AlCl₃. After 19 days, root length and plant height were measured. Root and plant height data for transgenic plants were statistically compared to non-transgenic (NT) internal segregant lines, pooled NT internal segregant lines, external NT lines, and all NT lines. Comparisons were also made to plants not treated with AL containing water.

[0227] Tables 6 and 7 contain the results of line 745282 (7 events) for root expansion at 19 days and plant height at 19 days, respectively. For line 745282, a significant increase in root expansion was observed for events 745282, 745284, 745252, and 745307; a significant increase in plant height was observed for events 745284 and 745236.

[0228] Tables 8 and 9 contain the results for Os713 and Os879 for root expansion at 19 days and plant height at 19 days, respectively. For Os879, a significant increase in plant height was observed for event 7.

TABLE 6
Root expansion (cm) under Aluminum treatment 19 d

| | | | | | | | P-value | | | |
|---|---|---|---|---|---|---|---|---|---|---|
| | Transgenics | | | Non-transgenics | | | Line | Pooled | | |
| | | Standard | Number | | Standard | Number | Internals | Internals | External | Internal + |
| Genotype | Average | Deviation | of plants | Average | Deviation | of plants | NT | NT | NT | External |
| 745282 | 4.55 | 2.9 | 11 | 4.2 | 2.68 | 5 | 0.78 | 0.41 | 0.006 | 0.10 |
| 745284 | 6.38 | 2.05 | 8 | 4.06 | 1.82 | 8 | 0.03 | 0.01 | 3.83E−05 | 0.001 |
| 745236 | 2.23 | 3.14 | 13 | 4.17 | 3.82 | 3 | 0.39 | 0.09 | 0.90 | 0.226 |
| 745252 | 5 | 2.96 | 7 | 3.06 | 3.26 | 9 | 0.24 | 0.30 | 0.011 | 0.083 |
| 745306 | 5.6 | 3.44 | 5 | 6.29 | 2.1 | 11 | 0.62 | 0.18 | 0.008 | 0.050 |
| 745312 | 7.02 | 2.16 | 16 | n/a | n/a | n/a | n/a | 9.93E−05 | 3.58E−08 | 4.25E−07 |
| 745307 | 5.19 | 2.9 | 8 | 4.13 | 2.4 | 8 | 0.44 | 0.20 | 0.005 | 0.043 |
| All transgenics | 5.1 | 3.03 | 68 | 5.1 | 9.06 | | | 0.042 | 0.0001 | 0.001 |
| Pooled NT | | | | 3.833 | 2.59 | 33 | | | | |
| External WT | | | | 2.347 | 2.01 | 23 | | | | |
| Internal + | | | | 3.22 | 2.46 | 56 | | | | |
| External | | | | | | | | | | |

TABLE 7
Plant height (cm) under Aluminum treatment 19 d

| | | Number | Transgenics | | | Non-transgenics | | | P-value | | | |
|---|---|---|---|---|---|---|---|---|---|---|---|---|
| | Copy | of | | | Number | | | Number | Line | Pooled | | Internal + |
| | number of | plants | | Standard | of | | Standard | of | Internals | Internals | External | External |
| Genotype | transgene | tested | Average | Deviation | plants | Average | Deviation | plants | NT | NT | NT | NT |
| 745282 | 1 | 16 | 21.45 | 2.9 | 11 | 24.3 | 7.98 | 5 | 0.32 | 0.38 | 0.0002 | 0.293 |
| 745284 | 1 | 16 | 25.63 | 4.24 | 8 | 21.25 | 3.01 | 8 | 0.032 | 0.08 | 3.66E−06 | 0.005 |
| 745236 | 2 | 16 | 23.23 | 2.01 | 13 | 22.67 | 3.06 | 3 | 0.693 | 0.64 | 7.56E−07 | 0.026 |
| 745252 | 1 | 16 | 23.86 | 7.78 | 7 | 21.83 | 3.76 | 9 | 0.502 | 0.56 | 0.0009 | 0.076 |
| 745306 | 1 | 16 | 23.96 | 3.33 | 5 | 25 | 5.56 | 11 | 0.707 | 0.51 | 0.0004 | 0.0958 |
| 745312 | 2 | 16 | 23.98 | 1.92 | 16 | n/a | n/a | n/a | n/a | 0.23 | 1.14E−08 | 0.003 |
| 745307 | 1 | 16 | 21.44 | 2.29 | 8 | 23.94 | 2.88 | 8 | 0.075 | 0.43 | 8.77E−04 | 0.367 |
| All | 1 & 2 | 112 | 23.31 | 9.42 | 68 | | | | | 0.42 | 8.38E−11 | 0.0003 |
| transgenics | | | | | | | | | | | | |
| Pooled NT | 0 | 33 | | | | 22.67 | 9.53 | 33 | | | | |
| External WT | 0 | 23 | | | | 15.2 | 9.54 | 23 | | | | |
| Internal + | 0 | 56 | | | | 19.59 | 4.99 | 56 | | | | |
| External | | | | | | | | | | | | |

TABLE 8
Root Length after 19 d aluminum treatment

| | Transgenics | | | Non-transgenics | | | P-value | | | |
|---|---|---|---|---|---|---|---|---|---|---|
| | | Standard | Number | | Standard | Number | Internal | Pooled | External | Internal + |
| Genotype | Average | Deviation | of plants | Average | Deviation | of plants | NT | NT | WT | External |
| W2 (939-006) | 6.1 | 1.55 | 7 | 4.4 | 1.35 | 3 | 0.14 | | 0.49 | 0.22 |
| 713-3 | 5.32 | 0.53 | 6 | 6.13 | 1.31 | 4 | 0.21 | 0.95 | 0.55 | 0.75 |
| 713-5 | 4.63 | 1.60 | 8 | 4 | 0 | 2 | 0.61 | 0.36 | 0.19 | 0.16 |
| 713-7 | 4.19 | 1.93 | 8 | 5 | | 1 | 0.70 | 0.21 | 0.11 | 0.06 |
| 879-4 | 4.33 | 1.22 | 9 | 7 | | 1 | 0.07 | 0.33 | 0.04 | 0.06 |
| 879-7 | 5.56 | 1.81 | 9 | 4 | | 1 | 0.44 | 0.63 | 0.95 | 0.80 |
| 879-8 | 4.29 | 0.70 | 7 | 4.8 | 1.31 | 3 | 0.43 | 0.23 | 0.02 | 0.04 |
| All T713 | 4.65 | 1.54 | 22 | | | | | | | |
| All T879 | 4.76 | 1.44 | 25 | | | | | | | |
| Pooled NT 713_879 | | | | 5.24 | 1.35 | 12 | | | | |
| Pooled NT_713 | | | | 5.36 | 1.38 | 7 | | | | |
| Pooled NT_879 | | | | 5.08 | 1.46 | 5 | | | | |
| External NT WT | | | | 5.6 | 1.02 | 7 | | | | |
| All NT SAP + | | | | 5.37 | 1.22 | 19 | | | | |
| Externals | | | | | | | | | | |
| External + NT713 | | | | 5.48 | 1.19 | 14 | | | | |
| External + NT879 | | | | 5.38 | 1.19 | 12 | | | | |
| All T713_Untreated | 7.93 | 2.09 | 7 | | | | | | | |
| All T879_Untreated | 7.7 | 1.86 | 8 | | | | | | | |
| All T W2_Untreated | 5.44 | 1.40 | 8 | | | | | | | |
| T713_879_Untreated | 7.09 | 1.46 | 11 | | | | | | | |
| NT713_879_Untreated | | | | 7 | 1.91 | 7 | | | | |

TABLE 9
Plant height after 19 d aluminum treatment

| | | Number | Transgenics | | | Non-transgenics | | | | | | |
|---|---|---|---|---|---|---|---|---|---|---|---|---|
| | Copy | of | | | Number | | | Number | P-value | | | |
| | number of | plants | | Standard | of | | Standard | of | Internal | Pooled | External | Internal + |
| Genotype | transgene | tested | Average | Deviation | plants | Average | Deviation | plants | NT | NT | WT | External |
| W2 (939-006) | 1 | 10 | 16.17 | 0.99 | 7 | 15.33 | 2.04 | 3 | 0.39 | | 0.20 | 0.24 |
| 713-3 | 1 | 10 | 18.3 | 1.01 | 6 | 17.4 | 1.37 | 4 | 0.26 | 0.00 | 0.06 | 0.13 |
| 713-5 | 1 | 10 | 16.76 | 1.60 | 8 | 17.15 | 0.92 | 2 | 0.76 | 0.55 | 0.11 | 0.35 |
| 713-7 | 1 | 10 | 15.06 | 6.78 | 8 | 16.5 | 0.135 | 2 | 0.85 | 0.43 | 0.54 | 0.99 |
| 879-4 | 1 | 10 | 14.78 | 2.89 | 9 | 17.9 | | 1 | 0.34 | 0.07 | 0.45 | 0.93 |
| 879-7 | 1 | 10 | 17.94 | 2.06 | 9 | 16 | | 1 | 0.40 | 0.85 | 0.04 | 0.13 |
| 879-8 | 1 | 10 | 18.09 | 1.71 | 7 | 18.23 | 2.87 | 3 | 0.92 | 0.75 | 0.06 | 0.15 |
| All T713 | 1 | | 16.56 | 4.26 | 22 | | | | | | | |
| All T879 | 1 | | 16.844 | 2.73 | 25 | | | | | | | |
| Pooled NT 713_879 | 0 | | | | | 17.42 | 1.60 | 12 | | | | |
| Pooled NT_713 | 0 | | | | | 17.2 | 1.09 | 7 | | | | |
| Pooled NT_879 | 0 | | | | | 17.72 | 2.25 | 5 | | | | |
| External NT WT | 0 | | | | | 12.96 | 6.19 | 7 | | | | |
| All NT SAP + | | | | | | 15.77 | 4.38 | 19 | | | | |
| Externals | | | | | | | | | | | | |
| External + NT713 | | | | | | 15.08 | 4.80 | 14 | | | | |
| External + NT879 | | | | | | 14.94 | 5.36 | 12 | | | | |
| All T713_Untreated | | | 18.68 | 1.11 | 7 | | | | | | | |
| All T879_Untreated | | | 16.63 | 1.41 | 8 | | | | | | | |
| All T W2_Untreated | | | 17.89 | 1.61 | 8 | | | | | | | |
| T713_879_Untreated | | | 17.58 | 1.63 | 15 | | | | | | | |
| NT713_879_Untreated | | | 18.41 | 2.86 | 7 | | | | | | | |

### Example 6—Determination of Functional Homologs by Reciprocal BLAST

[0229] A candidate sequence was considered a functional homolog of a reference sequence if the candidate and reference sequences encoded proteins having a similar function and/or activity. A process known as Reciprocal BLAST (Rivera et al., Proc. Natl. Acad. Sci. USA, 95:6239-6244 (1998)) was used to identify potential functional homolog sequences from databases consisting of all available public and proprietary peptide sequences, including NR from NCBI and peptide translations from Ceres clones.

[0230] Before starting a Reciprocal BLAST process, a specific reference polypeptide was searched against all peptides from its source species using BLAST in order to identify polypeptides having BLAST sequence identity of 80% or greater to the reference polypeptide and an alignment length of 85% or greater along the shorter sequence in the alignment. The reference polypeptide and any of the aforementioned identified polypeptides were designated as a cluster.

[0231] The BLASTP version 2.0 program from Washington University at Saint Louis, Mo., USA was used to determine BLAST sequence identity and E-value. The BLASTP version 2.0 program includes the following parameters: 1) an E-value cutoff of 1.0e-5; 2) a word size of 5; and 3) the -postsw option. The BLAST sequence identity was calculated based on the alignment of the first BLAST HSP (High-scoring Segment Pairs) of the identified potential functional homolog sequence with a specific reference polypeptide. The number of identically matched residues in the BLAST HSP alignment was divided by the HSP length, and then multiplied by 100 to get the BLAST sequence identity. The HSP length typically included gaps in the alignment, but in some cases gaps were excluded.

[0232] The main Reciprocal BLAST process consists of two rounds of BLAST searches; forward search and reverse search. In the forward search step, a reference polypeptide sequence, “polypeptide A,” from source species SA was BLASTed against all protein sequences from a species of interest. Top hits were determined using an E-value cutoff of 10⁻⁵ and a sequence identity cutoff of 35%. Among the top hits, the sequence having the lowest E-value was designated as the best hit, and considered a potential functional homolog or ortholog. Any other top hit that had a sequence identity of 80% or greater to the best hit or to the original reference polypeptide was considered a potential functional homolog or ortholog as well. This process was repeated for all species of interest.

[0233] In the reverse search round, the top hits identified in the forward search from all species were BLASTed against all protein sequences from the source species SA. A top hit from the forward search that returned a polypeptide from the aforementioned cluster as its best hit was also considered as a potential functional homolog.

[0234] Functional homologs were identified by manual inspection of potential functional homolog sequences. Representative functional homologs for SEQ ID NOs: 353, 237, 451, and 2 are shown in FIGS. 1-4, respectively. Additional exemplary homologs are correlated to certain Figures in the Sequence Listing.

### Example 7—Determination of Functional Homologs by Hidden Markov Models

[0235] Hidden Markov Models (HMMs) were generated by the program HMMER 2.3.2. To generate each HMM, the default HMMER 2.3.2 program parameters, configured for global alignments, were used.

[0236] An HMM was generated using the sequences shown in FIG. 1 as input. These sequences were fitted to the model and a representative HMM bit score for each sequence is shown in the Sequence Listing. Additional sequences were fitted to the model, and representative HMM bit scores for any such additional sequences are shown in the Sequence Listing. The results indicate that these additional sequences are functional homologs of SEQ ID NO: 353.

[0237] The procedure above was repeated and an HMM was generated for each group of sequences shown in FIGS. 2-4, using the sequences shown in each Figure as input for that HMM. A representative bit score for each sequence is shown in the Sequence Listing. Additional sequences were fitted to certain HMMs, and representative HMM bit scores for such additional sequences are shown in the Sequence Listing. The results indicate that these additional sequences are functional homologs of the sequences used to generate that HMM.

### OTHER EMBODIMENTS

[0238] It is to be understood that while the invention has been described in conjunction with the detailed description thereof, the foregoing description is intended to illustrate and not limit the scope of the invention, which is defined by the scope of the appended claims. Other aspects, advantages, and modifications are within the scope of the following claims.

The application's sequence listing, which the Patent Office published only in electronic form, follows.

SEQUENCE LISTING (772 sequences)

SEQ ID NO: 1 - DNA, 2172 bp, Panicum virgatum
gctcgctccctccctccctccctcccgcgcggatcacagaagggctcacggtcacggccggcctcccaattcgcaacctcgcctccgcctctcctcctaccccctccgaaaagcaagctccggccgggccgccaccaccaccaccgcgcgcgcgtgcacgcgctcccacacacagacagacagacagacagacagagtgagagacgcacggtggttcggggtctcccttctgccaggcgcacgaggagccatggcgcagcgcgacaagaaggaggagcccacggagctccgggcgccggagatcacgctgtgcgccaacaactgcgggttcccgggtaacccggccacgcagaacctgtgccagagctgcttctcggcgtcgaggtcgccgtcgtcccctacctcctcctcctcttccctggcgtccgcggcgtcgcagccgaggccagcagcgctcgtcgtagacgcggcagcggtggaggcgctggccgctccggcggccgcggccgcgggccagggccaggctacggaagccgcggcgagggcgtccgcgagccggtgctccagctgccggaagcgcgtggggctgacggggttccggtgccgctgcggcgagctcttctgcgcccaagaaccccccactcccctccaccccaccccgcacccaccgcaagcgagaggcgagagccagcagccaagaagcagcagcagcagcagcagcagcagctatggtggcgcagcgccgggacgccgaggcggagctgaacctgcccccggggttccgcttccaccccaccgacgaggagctggtggcgcactacctctgcgcgcgcgccgccgggcgcggcccgccggtgcccatcatcgccgaggtcgacctctaccgcttcgacccctgggacctccccgagcgcgccctcttcggccgccgcgagtggtacttcttcacgcccagggaccgcaagtaccccaacggctcccgccccaaccgcgccgccgggacgggctactggaaagccaccggcgccgacaagcccgtccaccacgccggccgcaccctcgggatcaagaaggcgctcgtcttctaccacggcaagccgccgcgcggggtcaagaccgagtggatcatgcacgagtaccgcctcgccgacgccggcaccaagaagcccggcaacggctcgctcaggctggacgactgggtgctgtgccgcctgtacaacaagaagaacgagtgggagaagatgcagcagcagaaggggaaggcgatggagtcggaggcgtcgctctcccactcccactcccactccgacacgcgcacgccggagtcggagatcgacgacgacacgttcccggtgctgggcttgctgccggagttcgacgacatgggccccgctcccgctctcgcccccgcccccgccggcgccgtcctgcccaaggaggaggtgcaggacttcgtcaacctcggcggcgacgactggctcgcggggatcaacctcgactacctgcagatgcccggggacgccgacttcttcaacaacatgctcgggtcgccgatgggtcctcccaagccggagcaggacggcggcttcctgctattctgaacctgatgggctctgctccgattagctctgctctgctctgctccgaccccgaagagggatgcagctgcaactgtgaatagttcagatttgctttccatttagagaaacaaaaaattcctgctaatgcctggttggttgtagtgccgtagaccgtagtggtgtagtgcagaagtagtggtggtatgcaggtcagccaaggattggagtccagtgtaggactgaagctcatcattggagcttgtgatcagtgacaaaattctttcgtttctggttcagtaatttatcatcatttagatttgtttcttcagaattcagatgggcaaatgacattcagccgttttgtgttccttgtctctgaatattggatggtcatcccatttctgtttggccttttcgtttgtgatgatgatttttcagtgtgctactctttgcattcaggaattgttcttactcgatgagcaccgcgttcctttgcttccgtacaggccatgtgttctgtttgttcaaatgtagcagtggatgtttggtttctgttcagcgggtagcacagagaagaggcgatgggcagtac

SEQ ID NO: 2 - protein, 290 aa, Panicum virgatum
MVAQRRDAEAELNLPPGFRFHPTDEELVAHYLCARAAGRGPPVPIIAEVDLYRFDPWDLPERALFGRREWYFFTPRDRKYPNGSRPNRAAGTGYWKATGADKPVHHAGRTLGIKKALVFYHGKPPRGVKTEWIMHEYRLADAGTKKPGNGSLRLDDWVLCRLYNKKNEWEKMQQQKGKAMESEASLSHSHSHSDTRTPESEIDDDTFPVLGLLPEFDDMGPAPALAPAPAGAVLPKEEVQDFVNLGGDDWLAGINLDYLQMPGDADFFNNMLGSPMGPPKPEQDGGFLLF

SEQ ID NO: 3 - protein, 300 aa, Zea mays
MVAMAAVQQQQQQQRRDAEAELNLPPGFRFHPTDEELVAHYLCARAAGRRPPVSIIAEVDLYRFDPWDLPERALFGRREWYFFTPRDRKYPNGSRPNRAAGSGYWKATGADKPVEHEGRTAGIKKALVFYHGKPPRGVKTEWIMHEYRLAEAGGARAKKSGAGTLRLDDWVLCRLYNKKNEWEKMQQQKEKEKKAMESEASLSHSHSDTRTPESEIDDDPFPELGSLPAFDDMGAAPAPAGVVLPKEEVEDFGDLGGDDWLAGINLDDLQMPGDAADFYGSMLVSPMAAKMEPDGGFPFF

SEQ ID NO: 4 - protein, 290 aa, Sorghum bicolor
MVMTTAAQQQRRDAEAELNLPPGFRFHPTDEELVAHYLCARAAGRRPPVSIIAEVDLYRFDPWDLPERALFGRREWYFFTPRDRKYPNGSRPNRAAGSGYWKATGADKPVEHRGRTVGIKKALVFYHGKPPRGVKTEWIMHEYRLADAGGARAKKSGNGTLRLDDWVLCRLYNKKNEWEKMQQQKEKKEMESEASLSHSDTRTPESEIDDDPFPELASLPALDDMVGLAPAAGAILPKEEVEDFGDLGGDDWLAGINLDDLQMPGDADFFGNMLSPMAAKMEQDAGFPFF

SEQ ID NO: 5 - protein, 287 aa, Triticum
MVMAAAERRDAEAELNLPPGFRFHPTDEELVADYLCARAAGRAPPVPIIAELDLYRFDPWELPERALFGAREWYFFTPRDRKYPNGSRPNRAAGGGYWKATGADRPVARAGRTVGIKKALVFYHGRPSAGVKTDWIMHEYRLAGADGRAAKNGGTLRLDEWVLCRLYNKKNQWEKMQRQRQEEEAAAKAAASQSVSWGETRTPESDVDNDPFPELDSLPEFQTANASILPKEEVQELGNDDWLMGISLDDLQGPGSLMLPWDDSYAASFLSPVATMKMEQDVSPFFF

SEQ ID NO: 6 - DNA, 951 bp, Oryza sativa
atggggatggggatgaggagggagagggacgcggaggcggagctgaacctgccgccggggttcaggttccaccccacggacgacgagctggtggagcactacctgtgcaggaaggcggcggggcagcgcctgccggtgccgatcatcgccgaggtggatctctacaagttcgacccgtgggatctgcccgagcgcgcgctgttcggcgccagggagtggtacttcttcaccccgcgggatcgcaagtatcctaatgggtcacgccccaaccgcgccgccggcaacgggtactggaaggccaccggcgccgacaagcccgtcgcgccgcgggggcgcacgcttgggatcaagaaggcgctcgtgttctacgccggcaaggcgccgcgaggggtcaagactgattggatcatgcatgagtaccggctcgccgatgctggccgcgccgccgcgggcgccaagaagggatctctcaggttggatgattgggtgctgtgtcggctgtacaacaagaagaacgagtgggagaagatgcagcaggggaaggaggtgaaggaggaggcgtccgacatggttacgtcgcagtcgcactcgcacacccactcgtggggcgagacgcgcacgccggagtcggagatcgtggacaacgaccccttcccggagctggactcgttcccggcgttccagcctgcgccgccgccggcgacggcgatgatggtgcccaagaaagaatcgatggacgacgccaccgcggccgccgccgccgccgccaccatccccaggaacaacagcagcctgttcgtggacctgagctacgacgatatccagggcatgtacagcggcctcgacatgctgccgccgggcgacgacttctactcgtcgctcttcgcgtcgccgcgggtgaaggggacgacgccacgcgccggcgccggcatgggcatggtcccgttctga

SEQ ID NO: 7 - protein, 316 aa, Oryza sativa
MGMGMRRERDAEAELNLPPGFRFHPTDDELVEHYLCRKAAGQRLPVPIIAEVDLYKFDPWDLPERALFGAREWYFFTPRDRKYPNGSRPNRAAGNGYWKATGADKPVAPRGRTLGIKKALVFYAGKAPRGVKTDWIMHEYRLADAGRAAAGAKKGSLRLDDWVLCRLYNKKNEWEKMQQGKEVKEEASDMVTSQSHSHTHSWGETRTPESEIVDNDPFPELDSFPAFQPAPPPATAMMVPKKESMDDATAAAAAAATIPRNNSSLFVDLSYDDIQGMYSGLDMLPPGDDFYSSLFASPRVKGTTPRAGAGMGMVPF

SEQ ID NO: 8 - protein, 303 aa, Elaeis guineensis
MGSRRRDAEAELNLPPGFRFHPTDEELVVHYLCKKVACQRLPVPIIAEVDLYKYDPWDLPEKALFGLKEWYFFTPRDRKYPNGSRPNRAAGRGYWKATGADKPVTPKGSSRPLGIKKALVFYSGKAPRGVKTDWIMHEYRLADTNRAANKKGSLRLDDWVLCRLYNKKNTWEKMQQQKEAASFGETMDSVDDTGSDSFRTPESDIDNDVMFPDFDDMAQVGAHPPQAFNGMQGVRVNNITGYQPAIEQRPKEENDWFTDLNLDDFHSTCMAFGSTPALDMSDHDYYYSNLPQLRSNQSDLLPF

SEQ ID NO: 9 - protein, 316 aa, Hordeum vulgare
MMTAMVKAEAMTAEAEGSSGRRDAEAELNLPPGFRFHPTDDELVVHYLCRKVAGQPQPVPIIAEVDLYKFNPWDLPERALFGSREWYFFTPRDRKYPNGSRPNRSAGTGYWKATGADKPVAPRESGGRTVGIKKALVFYSGRAPRGVKTDWIMHEYRIAQADRTPGKKGSLKLDEWVLCRLYNKKNNWDKVKVEQDMAVVQGQNGEVMDALATDAMSDSFQTHDSSEIDNASGLQQQHHGFMDMAQRQAREGMVTVKEDSDWFTGLSMDDLQTCYMNMGQMVNPAAMPVHDGSGYLQSMNSPQMMRPMWQTILPPF

SEQ ID NO: 10 - protein, 297 aa, Vitis vinifera
MKRERDAEAELNLPPGFRFHPTDEELVVHYLCRKASYQTLPVPIIVEIDLYKYDPWQLPEKALFGIKEWYFFTPRDRKYPNGSRPNRAAGNGYWKATGADKPVRPTGSTKAVGIKKALVFYSGKAPKGTKTDWIMHEYRLAQPNRSSDKKSSLRLDDWVLCRIYNKKNNWREKMQHQMNQLLPHEPIDPFEVAEDDGSDSLRTPESDIDIETLSYNHDLHGAQGQGYSYQVLHDNNLQITDTDSGFPARECFKEEDDYWLTNLNLEDLQNSLTTFGTMPLPDFSYQDSFSMIHGLPY

SEQ ID NO: 11 - protein, 300 aa, Crocus sativus
MGRRTADAEANLNLPPGFRFHPTDEELVVHYLCKKIISQRLPAAIIAEVDLYKYYPWQLPEKALFGHKEWYFLTPRDRKYPNGSRPNRAAGRGYWKATGADKPIAPKGGSSKPLGIKKALVFYSGKAPRGTKTDWIMHEYRLADSHRTASKKGSLRLDDWVLCRLYHKKNSWETKMQQHSSFGETKDSSFEAADDAGSDSFRPDIEHEPYPEFEEDLAKPTVYPPQTSDGMQAARTSNTVKQRVKEDNDWFMDLTLDDLQSPLEMFGTSTADLDVSNQDYFFQMLNSTQMKTSLTNLPPF

SEQ ID NO: 12 - protein, 387 aa, Picea sitchensis
MGRPNAEAQLNLPPGFRFFPTDDELVVHYLCRKAASQAIAVPIIAEVDLYKFDPWQLPEKALFGEKEWYFFTPRDRKYPNGSRPNRAAGSGYWKATGADKPITAKGSNKRVGIKKALVFYVGKAPKGNKTNWIMHEYRLADVNRSAKKKGSLRLDDWVLCRIYNKKSSAEKLAKEQKEWSSEEAMEQFHEEIDEKVPGILPTGNTIMNSSIEHSERTSQDSTISAPSPNCRTASNHDSRASAITSLSYNSNPIFEQNLNLSNARSAPMEIPELVPFFSSMNNHRTNYDSADLIPPILLTDSSCSMQSSHDLKSEKEEVQSSFRLEELMQQQQQENAGLNQQMFSFGFESLQNPFPSLDQIQPPTNNDPFQDYLASLTVPSYLQRSSY

SEQ ID NO: 13 - protein, 295 aa, Prunus mume
MSSSDLQLPPGFRFHPTDEELVKHYLCRKCQSQPISVPIIAEIDLYKYNPWDLPGLALYGEKEWYFFSPRDRKYPNGSRPNRAAGSGYWKATGADKPIGSPKPVGIKKALVFYAGKAPRGEKTNWIMHEYRLADVDRSPRKKSSSLRLDDWVLCRIYNKKGTVEKQQQQQQQQQQQTTSRMSSGSEFEDRKPENLACPPPPAAVAPTRPNDYVYFDTSDSVPRLHTDSSCSEHVVSPEFTCEVQSEPKWKEWEKALDFNYNYMDTSVENGFGPQFQSANQMSPLQDIFMYLQKPY

SEQ ID NO: 14 - protein, 304 aa, Petunia x hybrida
MTTAELQLPPGFRFHPTDEELVMHYLCRKCASQPIAVPIIAEIDLYKYDPWDLPDLALYGEKEWYFFSPRDRKYPNGSRPNRAAGTGYWKATGADKPIGHPKAVGIKKALVFYAGKAPKGEKTNWIMHEYRLADVDRSARKNNNSLRLDDWVLCRIYNKKGSIEKNQLNNKKIMNTSYMDMTVSSEEDRKPEILPPLPPQPAPQQQQVYNDFFYLDPSDSVPKIHSDSSCSEHVVSPEFTCEREVQSEAKLSEWEKAALDLPFNYMDATTGATTLDNSLLGSQFQSSYQMSPLQDMFMHLHKPF

SEQ ID NO: 15 - protein, 303 aa, Avicennia marina
MKGGDQQLNLPAGFRFHPTDEELVVHYLCRKCAGQQIGVPVIAEIDLYKFDPWELPDLALYGEKEWYFFSPRDRKYPNGSRPNRAAGTGYWKATGADKPVGKPKTLGIKKALVFYAGKAPRGVKTNWIMHEYRLANVDRSAGKTKNLRLDDWVLCRIYNKKGTLEKHLSVDQKEVQFSDSEEQKPEVDAFPFGDMVMPGPAPPVQAPVTLASQRMNDYMHFDASDSFPKLHTDSSSSEHVLSPEFMCDKEVQSAPKWSELESTLDFPLIYMDGFQDDPFGSQMQYGDQLSLFPDMYAYMQKPF

SEQ ID NO: 16 - DNA, 1182 bp, Panicum virgatum
aagaaccccccactccactccactcaatccgcctcagccgcagccggccaccccacccaccgcaaggagcgagagccaccaaccaagaagcagccatggtgacggcggcggccgcgacgcagcgccgtgacgccgaggcggagctgaacctgcccccgggcttccgcttccaccccaccgacgaggagctcgtcgcgcactacctctgcgcgcgcgccgccgggcgcagcgcgccggtgcccatcatcgccgaggtcgacctctaccgcttcgacccctgggagctccccgagcgcgccctcttcggccgccgcgagtggtacttcttcacgccgagggaccgcaagtaccccaacggctcccgccccaaccgcgccgccgggaccgggtactggaaggccaccggcgccgacaagcccatccagcacgggggccggaccctggggatcaagaaggcgctcgtcttctaccacgggaagccgccgcgcgggatcaagaccgagtggatcatgcacgagtaccgcctcgccgacgccggcggcaagaagcccggcaacggctcgctcaggctggacgactgggtgctgtgccgcctctacaacaagaagaacgagtgggagaagatgcagcagcagaaggagaaggcaatgaagtcggaggcgtcgctctcgcactcccactcccactccgacacgcgcacgccggagtcggagatcgacgacgacacgttcccggggctgggctcgctgccggagttcgacggcatgcgccccgcccccgccggcgccgtcctgcccaaggaggaggtgcaggacttcggcaacctcggcggcgacgactggctcgcggggatcaacctcgactacctgcaggtgcccggggacgccgacttcttcaacaacatgaccctattctgaacctgagctctgctccgatttgctctgctctgctctgctccgaccccgaggagggatgcagctgcaactgtgaatagttcagatttgctttccattcagagaaacaaaaattattcctgctaatgcctggttgtagtgccgtagaccgtagtggtgtcgtgcagtagtggtatgcaggtcagcatggattggagtccagtataggattgaagctcatcattggagcttgtgatcagtgacaaaattctttcgtttctggttcagc

SEQ ID NO: 17 - protein, 273 aa, Panicum virgatum
MVTAAAATQRRDAEAELNLPPGFRFHPTDEELVAHYLCARAAGRSAPVPIIAEVDLYRFDPWELPERALFGRREWYFFTPRDRKYPNGSRPNRAAGTGYWKATGADKPIQHGGRTLGIKKALVFYHGKPPRGIKTEWIMHEYRLADAGGKKPGNGSLRLDDWVLCRLYNKKNEWEKMQQQKEKAMKSEASLSHSHSHSDTRTPESEIDDDTFPGLGSLPEFDGMRPAPAGAVLPKEEVQDFGNLGGDDWLAGINLDYLQVPGDADFFNNMTLF

SEQ ID NO: 18 - DNA, 1314 bp, Zea mays
ccaagaccaagaccaacaccactccactccctccatttccctcacctcccgcagcagctagccgccagccaacaaccgaaccaaccaaccaacccacaggccacagcgagcgagtaaagcgtccaatggtagcgatggcggccgtgcagcagcagcagcagcagcagcgccgcgacgcggaggcggasctcaacctgcccccgggcttccggttccacccgacggacgaggagctggtggcgcactacctctgcgcgcgcgccgcggggcgccgcccgccggtgtccatcatcgccgaggtcgacctgtaccgcttcgacccctgggacctgccggagcgcgccctcttcgggcgccgcaagtggtacttcttcacgccgcgggaccgcaagtaccccaacggctcccgccccaaccgcgccgccgggtcgggctactggaaggccacgggcgcggacaagcccgtggagcacgagggccggacggcggggatcaagaaggcgctcgtgttctaccacggcaagccgccgcgcggggtcaagacggagtggatcatgcacgagtaccgcctcgccgaagccggcggcgcccgcgccaagaagtccggcgccggcacgctcaggctggatgactgggtgctgtgccgcctgtacaacaagaagaacgagtgggagaagatgcagcagcagaaggagaaggagaagaaggcgatggagtcggaggcgtcgctctcgcactcccactccgacacgcggacgccggaatcggagatcgacgacgacccgttcccggagctgggctctctaccggcgttcgacgacatgggcgcagccccagcccctgccggcgtcgtcctgcccaaggaggaggtggaggacttcggcgacctcggcggcgacgactggctcgcgggcatcaacctcgacgacctgcagatgccgggggacgccgccgatttctacggctccatgctcgtctcgccgatggccgccaagatggagccggacggcggcttccccttcttctgagatccttcggcgactccggggacgaccggatgcagcgcaacgcaaactgtgtatagttcagattttcttcatggaaccaacaacaacaaaaaaagttcttgctaatatcttgttctagtggtgtagtgcagaagtagcagcaacatgattgaagttccattgtagtactgatgttcatcgccacttgagctgtgacaagtgacgacattctttcgtttcttggctgcaaattcttcgttgtccagaatataatttcagatgggtaatgccaattcgggacgtgttg

SEQ ID NO: 19 - protein, 300 aa, Zea mays
  misc_feature (21)..(21): Xaa can be any naturally occurring amino acid
MVAMAAVQQQQQQQRRDAEAXLNLPPGFRFHPTDEELVAHYLCARAAGRRPPVSIIAEVDLYRFDPWDLPERALFGRRKWYFFTPRDRKYPNGSRPNRAAGSGYWKATGADKPVEHEGRTAGIKKALVFYHGKPPRGVKTEWIMHEYRLAEAGGARAKKSGAGTLRLDDWVLCRLYNKKNEWEKMQQQKEKEKKAMESEASLSHSHSDTRTPESEIDDDPFPELGSLPAFDDMGAAPAPAGVVLPKEEVEDFGDLGGDDWLAGINLDDLQMPGDAADFYGSMLVSPMAAKMEPDGGFPFF

SEQ ID NO: 20 - protein, 303 aa, Zea mays
MVMAPAAAQQQRRRDAEAELNLPPGFRFHPTDEELVAHYLCARAAGRRPPVSIIAEVDLYRFDPWDLPERALFGRREWYFFTPRDRKYPNGSRPNRAAGSGYWKATGADKPVEHGGRTVGVKKALVFYHGKPPRGVKTEWIMHEYRLADAGARARARKPGTGTLRLDDWVLCRLYNKKNEWEKTQQQQEKKQNQKQMESEASLSHSHSDTRTPESEIDDDPFPELASLPALDDMMGPAAAAPAGAILPKEEVEDLGGLGGDDWLAGINLDDLQIPGEADFYGSMLVSPMAAKMEQDAAGFPFF

SEQ ID NO: 21 - DNA, 1222 bp, Zea mays
  misc_feature (670)..(670): y is t/u or c
  misc_feature (682)..(682): y is t/u or c
  misc_feature (712)..(712): s is g or c
ccggccaacacccgcaccgcagtccacagcaagaaccaagccacagcgaagaaaagatccaatggtgatggcgccggcggcggcgcagcagcagcggcgccgcgacgcggaggcggagctgaacctgcccccgggcttccggttccacccgacggacgaggagctggtggcgcactacctctgcgcgcgcgccgcgggtcgccgccccccggtgtccatcatcgccgaggtcgacctctaccgcttcgacccctgggacctgcccgagcgcgccctcttcggccgccgcgagtggtacttcttcacgccgcgggaccgcaagtaccccaatggctcccgccccaaccgcgccgccgggtcggggtactggaaggccacgggagcggacaagcccgtggagcacggtggcaggacggtcggcgtcaagaaggcgctcgtgttctaccacggcaagccgccgcgcggggtcaagacggagtggatcatgcacgagtaccgcctcgccgacgccggcgcccgcgcccgcgccaggaagcccggcaccggcacgctcaggttggatgactgggtgctctgccggctgtacaacaagaagaacgagtgggagaagacgcagcagcagcaggagaagaagcagaatcagaagcaaatggagtcggaggcctcgctytcgcactcccaytcagacacgcggacgccggagtcggagatsgacgacgacccgttcccggagctggcctcgctgccggcactcgacgacatgatgggcccagcagcagcagcgcctgccggcgccattttgcccaaggaggaggtggaagacttgggcggcctcggcggggacgactggctcgcgggcatcaacctcgacgacctgcagatcccgggcgaggccgacttttatggctccatgctcgtgtcgccgatggccgccaagatggagcaggacgccgccggcttcccgtttttttgagaccttttgcgcaacgcaaactgtgtatagttcagattttttcaggattcggagaaaaaaacagttttgttgatatttggttgtagtggtttagtgcacaagcagcagtatgccggtcagttaagattgaagtccattgtagttcatccccacttgagctgtgactgtgataagtgacagcattctttcatttttggtttgttaatttttcaatggtcagaatatagtttgtggccttcccagagtggt

SEQ ID NO: 22 - protein, 303 aa, Zea mays
  misc_feature (203)..(203): Xaa can be any naturally occurring amino acid
  misc_feature (207)..(207): Xaa can be any naturally occurring amino acid
  misc_feature (217)..(217): Xaa can be any naturally occurring amino acid
MVMAPAAAQQQRRRDAEAELNLPPGFRFHPTDEELVAHYLCARAAGRRPPVSIIAEVDLYRFDPWDLPERALFGRREWYFFTPRDRKYPNGSRPNRAAGSGYWKATGADKPVEHGGRTVGVKKALVFYHGKPPRGVKTEWIMHEYRLADAGARARARKPGTGTLRLDDWVLCRLYNKKNEWEKTQQQQEKKQNQKQMESEASXSHSXSDTRTPESEXDDDPFPELASLPALDDMMGPAAAAPAGAILPKEEVEDLGGLGGDDWLAGINLDDLQIPGEADFYGSMLVSPMAAKMEQDAAGFPFF

SEQ ID NO: 23 - DNA, 768 bp, Panicum virgatum
aagaaccccccactccactccaccccaccccgcacccaccgcaagcgagaggcgagagccagcagccaagcagcagcagcagcagcagctatggtggcgcagcgccgggacgccgaggcggagctgaacctgcccccggggttccgcttccaccccaccgacgaggagctggtggcgcactacctctgcgcgcgcgccgccgggcgcggcccgccggtacccatcatcgccgaggtcgacctctaccgcttcgacccctgggacctccccgagcgcgccctcttcggccgccgcgagtggtacttcttcacgcccagggaccgcaagtaccccaacggctcccgccccaaccgcgccgccgggacgggctactggaaggccaccggcgccgacaagcccgtccaccacgccggccgcaccctcgggatcaagaaggcgctcgtcttctaccacggcaagccgccgcgcggggtcaagaccgagtggatcatgcacgagtaccgcctcgccgacgccggcgccaagaagcccggcaacggctcgctcaggctggacgactgggtgctgtgccgcctgtacaacaagaagaacgagtgggagaagatgcagcagcagaaggggaaggcgatggagtcggaggcgtcgctctcccactcccactcccactcccactccgacacgcgcacgccggagtcggagatcgacgacgacacgttcccggtgctgggcttgctgccggagttcgacgacttggggcccgctcccgcc

SEQ ID NO: 24 - protein, 226 aa, Panicum virgatum
MVAQRRDAEAELNLPPGFRFHPTDEELVAHYLCARAAGRGPPVPIIAEVDLYRFDPWDLPERALFGRREWYFFTPRDRKYPNGSRPNRAAGTGYWKATGADKPVHHAGRTLGIKKALVFYHGKPPRGVKTEWIMHEYRLADAGAKKPGNGSLRLDDWVLCRLYNKKNEWEKMQQQKGKAMESEASLSHSHSHSHSDTRTPESEIDDDTFPVLGLLPEFDDLGPAPA

SEQ ID NO: 25 - DNA, 874 bp, Triticum aestivum
  misc_feature (5)..(5): y is t/u or c
  misc_feature (635)..(635): k is g or t/u
cattycgagacactcaacacagtccaccacgcacgtgcagcagcagcagcgcccgagaatcccattcccatcgacggagaagaagaagtgaagaaacaatggtgatggcagcggcggagcggcgggacgcggaggcggagctgaacctgccgccggggttccggttccacccgacggacgaggagctggtggcggactacctctgcgcgcgcgcggccggccgcgcgccgccggtgcccatcatcgccgagctcgacctctaccggttcgacccgtgggagctcccggagcgggcgctcttcggggcgcgggagtggtacttcttcacgccgcgggaccgcaagtaccccaacggctcccgccccaaccgggccgccgggggcggctactggaaggccaccggcgccgacaggcccgtggcgcgcgcgggcaggaccgtcgggatcaagaaggcgctcgtcttctaccacggcaggccgtcggcgggggtcaagacggactggatcatgcacgagtaccgcctcgccggcgccgacggacgcgccgccaagaacggcggcacgctcaggcttgacgactgggtgctctgccgcctatacaacaagaagaaccagtgggagaagatgcagcggcakcggcaggaggaggaggcggcggccaaggctgcggcgtcacagtcggtctcctggggtgagacgcggacgccggagtccgacgtcgacaacgatccgttcccggagctggactcgctgccggagttccagacggcaaacgcgtcaatactgcccaaggaggaggtgcaggagctgggcaacgacgactggctcatggggatcagcctcgacgacctgccggcacgagaagccggcacgag

SEQ ID NO: 26 - protein, 258 aa, Triticum aestivum
  misc_feature (179)..(179): Xaa can be any naturally occurring amino acid
MVMAAAERRDAEAELNLPPGFRFHPTDEELVADYLCARAAGRAPPVPIIAELDLYRFDPWELPERALFGAREWYFFTPRDRKYPNGSRPNRAAGGGYWKATGADRPVARAGRTVGIKKALVFYHGRPSAGVKTDWIMHEYRLAGADGRAAKNGGTLRLDDWVLCRLYNKKNQWEKMQRXRQEEEAAAKAAASQSVSWGETRTPESDVDNDPFPELDSLPEFQTANASILPKEEVQELGNDDWLMGISLDDLPAREAGT

SEQ ID NO: 27 - DNA, 654 bp, Panicum virgatum
aagaaccccccactccactccactcaacccgcctcagccgcagccggccaccccacccaccgcaaggagcgagagccaccaaccaagaagcagccatggtgacggcggccgcgacgcagcgccgtgacgccgaggcggagctgaacctgcccccgggcttccgcttccaccccaccgacgaggagctcgtcgcgcactacctctgcgcgcgcgccgccgggcgcagcgcgccggtgcccatcatcgccgaggtcgacctctaccgcttcgacccctgggagctccccgagcgcgccctcttcggccgccgcgagtggtacttcttcacgccgagggaccgcaagtaccccaacggctcccgccccaaccgcgccgccgggaccgggtactggaaggccaccggcgccgacaagcccgtccagcacgggggccggaccctggggatcaagaaggcgctcgtcttctaccacgggaagccgccgcgcgggatcaagaccgagtggatcatgcacgagtaccgcctcgccgacgccggcggcaagaagcccggcaacggctcgctcaggctggacgactgggtgctgtgccgcctctacaacaagaagaacgagtgggagaagatgcagcagcagaaggagaaggcaatggagtcgg

SEQ ID NO: 28 - protein, 186 aa, Panicum virgatum
MVTAAATQRRDAEAELNLPPGFRFHPTDEELVAHYLCARAAGRSAPVPIIAEVDLYRFDPWELPERALFGRREWYFFTPRDRKYPNGSRPNRAAGTGYWKATGADKPVQHGGRTLGIKKALVFYHGKPPRGIKTEWIMHEYRLADAGGKKPGNGSLRLDDWVLCRLYNKKNEWEKMQQQKEKAMES

SEQ ID NO: 29 - protein, 314 aa, Oryza sativa
MGMRRERDAEAELNLPPGFRFHPTDDELVEHYLCRKAAGQRLPVPIIAEVDLYKFDPWDLPERALFGAREWYFFTPRDRKYPNGSRPNRAAGNGYWKATGADKPVAPRGRTLGIKKALVFYAGKAPRGVKTDWIMHEYRLADAGRAAAGAKKGSLRLDDWVLCRLYNKKNEWEKMQQGKEVKEEASDMVTSQSHSHTHSWGETRTPESEIVDNDPFPELDSFPAFQPAPPPATAMMVPKKESMDDATAAAAAAATIPRNNSSLFVDLSYDDIQGMYSGLDMLPPGDDFYSSLFASPRVKGTTPRAGAGMGMVPF

SEQ ID NO: 30 - DNA, 710 bp, Zea mays
ttccctcacctcccgcagcagctagccgccagccaacaaccgaaccaaccaaccaacccacaggccacagcgagcgagtaaagcgtccaatggtagcgatggcggccgtgcagcagcagcagcagcagcagcgccgcgacgcggaggcggagctcaacctgcccccgggcttccggttccacccgacggacgaggagctggtggcgcactacctctgcgcgcgcgccgcggggcgccgcccgccggtgtccatcatcgccgaggtcgacctgtaccgcttcgacccctgggacctgccggagcgcgccctcttcgggcgccgcgagtggtacttcttcacgccgcgggaccgcaagtaccccaacggctcccgccccaaccgcgccgccgggtcgggctactggaaggccacgggcgcggacaagcccgtggagcacgagggccggacggcggggatcaagaaggcgctcgtgttctaccacggcaagccgccgcgcggggtcaagacggagtggatcatgcacgagtaccgcctcgccgaagccggcggcgcccgcgccaagaagtccggcgccggcacgctcaggctggatgactgggtgctgtgccgcctgtacaacaagaagaacgagtgggagaagatgcagcagcagagggagaaggagaagaaggcgatggagtcggaggcgtcgctctcgcactcccactcc

SEQ ID NO: 31 - protein, 207 aa, Zea mays
MVAMAAVQQQQQQQRRDAEAELNLPPGFRFHPTDEELVAHYLCARAAGRRPPVSIIAEVDLYRFDPWDLPERALFGRREWYFFTPRDRKYPNGSRPNRAAGSGYWKATGADKPVEHEGRTAGIKKALVFYHGKPPRGVKTEWIMHEYRLAEAGGARAKKSGAGTLRLDDWVLCRLYNKKNEWEKMQQQREKEKKAMESEASLSHSHS

SEQ ID NO: 32 - protein, 276 aa, Oryza sativa
MAAAKRRVRDAEADLNLPPGFRFHPTDEELVAHYLCPRAAGRAAPVPIIAELDLYRHDPWDLPHRALFGRREWYFFTPRDRKYPNGSRPNRAAASGYWKATGADKPVLHNGRTAGIKKALVFYHGKPPRGVKTEWIMHEYRLAKKGSAAAAAGAGALRLDDWVLCRLYNKKNEWEKMQSRKEEEEAMAAAQSWGETRTPESEVVDSDAFPEMDYSLPAASFDDALLPKEEARDDDWLMGMSLDDLQGLGSLLQADDLSMLAPPPAAKTEPLGAPFF

SEQ ID NO: 33 - protein, 276 aa, Oryza sativa
MAAAKRRVRDAEADLNLPPGFRFHPTDEELVAHYLCPRAAGRAAPVPIIAELDLYRHDPWDLPHRALFGRREWYFFTPRDRKYPNGSRPNRAAASGYWKATGADKPVLHNGRTAGIKKALVFYHGKPPRGVKTEWIMHEYRLAKKGGAAAAAGAGALRLDDWVLCRLYNKKNEWEKMQSRKEEEEAMAAAQSWGETRTPESEVVDSDAFPEMDYSLPAASFDDALLPKEEARDDDWLMGMSLDDLQGLGSLLQADDLSMLAPPPAAKTEPLGAPFF

SEQ ID NO: 34 - DNA, 960 bp, Sorghum bicolor
atgggattgccggtgatgaggagggagagggacgcggaggcggagctgaacctgccgccggggttccggttccaccccacagacgacgagctggtggagcactacctgtgccggaaagcggcggggcagcgcctcccggtgcccatcatcgcggaggtggacctatacaagttcgacccctgggacctgccggagcgcgcgctgttcggggtcagggagtggtacttcttcacgcccagggaccgcaagtacccaaacgggtcccgccccaaccgcgccgccggcaacgggtactggaaggccaccggcgccgacaagcccgtcgcgccgcggggccgcacgctcgggatcaagaaggcgctcgtcttctacgccgggaaggcgccgcgtggggtcaagacggactggatcatgcacgagtacaggctcgcggacgccggccgcgcagccgcctccaagaagggatcgctcaggctggatgactgggtgctgtgccgcctgtacaataagaagaacgagtgggagaagatgcagctggggaaggagtccgccgccggcgtcggcaccgccaaggaggaggcgatggacatgaccacctcgcactcgcactcccactcgcagtcgcactcgcactcgtggggcgagacgcgcacgccggagtcggagatcgtggacaacgacccgttcccggagctggactcgttcccggcgttccaggacccggcggcggcgatgatgatggtgcccaagaaggagcaggtggacgacggcagcgccgccgccaacgccgccaagagcagcgacctgttcgtggaccttagctacgacgacatccagggcatgtacagcggcctcgacatgctgcccccgccaggggaggacttcttctcctcgctcttcgcgtcgcccagggtcaaggggaaccagcccgccggagccgccgggttggggccattctga

SEQ ID NO: 35 - protein, 319 aa, Sorghum bicolor
MGLPVMRRERDAEAELNLPPGFRFHPTDDELVEHYLCRKAAGQRLPVPIIAEVDLYKFDPWDLPERALFGVREWYFFTPRDRKYPNGSRPNRAAGNGYWKATGADKPVAPRGRTLGIKKALVFYAGKAPRGVKTDWIMHEYRLADAGRAAASKKGSLRLDDWVLCRLYNKKNEWEKMQLGKESAAGVGTAKEEAMDMTTSHSHSHSQSHSHSWGETRTPESEIVDNDPFPELDSFPAFQDPAAAMMMVPKKEQVDDGSAAANAAKSSDLFVDLSYDDIQGMYSGLDMLPPPGEDFFSSLFASPRVKGNQPAGAAGLGPF

SEQ ID NO: 36 - protein, 315 aa, Oryza sativa
MGMRRERDAEAELNLPPGFRFHPTDDELVEHYLCRKAAGQRLPVPIIAEVDLYKFDPWDLPERAPFGAREWYFFTPRDRKYPNGSRPNRAAGNGYWKATGADKPVAPRGRTLGIKKALVFYAGKAPRGVKTDWIMHEYRLADAGRARPRAPRRDLSRLDDWVLCRLYNKKNEWEKMQQGKEVKEEASDMVTSQSHSHTHSWGETRTPESEIVDNDPFPELDSFPAFQPAPPPATAMMVPKKESMDDATAAAAAAATIPRNNSSLFVDLSYDDIQGMYSGLDMLPPGGDFYSSLFASPRVKGTTPRAGAGMGMVPF

SEQ ID NO: 37 - DNA, 1456 bp, Zea mays
gacaacaccgcgcgcgcaatacacgggacacacacgcagatccgagctaaccaccatcgacgagcgccagccgccagcagccgagccggaccgaccttttcttttttcttttacacagcgggacggagaaaggagtcaatcagccaaagccacccaccgcttttacccaccgatcggcgttgccgccgctagcattgtcggcttcagctccatccaaatccaccgccagcaagcaagcaagcaagccggcgccatgggtctgccgatgaggagggagagggacgcggaggcggagctgaacctgccgccggggttccggttccaccccaccgacgacgagctggtggagcactacctgtgccgcaaggcggcggggcagcgcctccccgtgcccatcatcgccgaggtggacctgtacaggttcgacccctgggacctgccggagcgcgcgctcttcggggcccgcgagtggtacttcttcacgcccagggaccgcaagtaccccaacggctcccgccccaaccgcgccgccggcaacgggtactggaaggccaccggcgccgacaagcccgtcgcgccgcgcggccgcacgctcgggatcaagaaggcgctcgtcttctacgccggcaaggcgccgcgcggggtcaagacggactggatcatgcacgagtacaggctcgccgacgccggccgcgccgccgccgccaagaaggggtcgcttaggttggatgactgggtgctgtgccggctgtacaacaagaagaacgagtgggagaagatgcagctggggaagaccgccgtcgccggcgtcggcgccaccaaggaggaggcgatggacatggccacctcgcacacgcactcccactcccaatcacactcgcactcgtggggcgagacgcgcacgccagagtcggagatcgtggacaacgacccgttcccggagctggactcgttcccggcgttccaggacccggcgatgatgatgacggtgcccaaggaggagcaggtggacggctgcagcgccaagagcggcaacctgttcgtggacctcagctacgacgacatccagggcatgtacagcggcctcgacatgctgccgccgcccggggaggacttctactcctcgctcttcgcgtctcccagggtcaaggggaaccagcccgccggagccgccgggttgggacagttctgagctgaggcgaggatggagccatggatcaggagatgaagacggttgcgaactctgtaaatacagcataggagtcgaacctgaccctgacccttgttggggttacaaggttttccgagtgtcggtgtagcgtacatggagccggcggcgcggccgggccggctcattctttagtttcacttccaaagcagacgggtagatatatgtgtagctgttcacttaaactctcttcgacagaacaaccgacgaaattttgctcttgtttat

SEQ ID NO: 38 - protein, 312 aa, Zea mays
MGLPMRRERDAEAELNLPPGFRFHPTDDELVEHYLCRKAAGQRLPVPIIAEVDLYRFDPWDLPERALFGAREWYFFTPRDRKYPNGSRPNRAAGNGYWKATGADKPVAPRGRTLGIKKALVFYAGKAPRGVKTDWIMHEYRLADAGRAAAAKKGSLRLDDWVLCRLYNKKNEWEKMQLGKTAVAGVGATKEEAMDMATSHTHSHSQSHSHSWGETRTPESEIVDNDPFPELDSFPAFQDPAMMMTVPKEEQVDGCSAKSGNLFVDLSYDDIQGMYSGLDMLPPPGEDFYSSLFASPRVKGNQPAGAAGLGQF

SEQ ID NO: 39 - DNA, 1434 bp, Panicum virgatum
ttcaagaacatcgcggaatccacaggacacagccagagctctctctcaaccaccagcagcagccggagctgaggagagcgttgcggtttcagagtgggagggagaaatcaaggagccagcttgatcaattgcagcttcagctttgccggccgatcagcgatcgccatgggagtgccggtgaggagggagagggacgcggaggcggagctgaacctgccgccggggttccggttccacccgacggacgacgagctggtggagcactacctgtgccggaaggcggcggggcagcgcctcccggtgcccatcatcgcggaggtggacctgtacaagttcgacccctgggacctgccggagcgcgcgctgttcggcacccgggagtggtacttcttcacgcccagggaccgcaagtaccccaacggctcgcgccccaaccgcgccgccgggaacggctactggaaggccaccggcgccgacaagcccgtcgcgccgcgggggcgcacgctggggatcaagaaggcgctcgtgttctacgccggcaaggcgccgcgcggggtcaagaccgactggatcatgcacgagtacaggctggccgacgccggccgcgccgccgcggccaagaagggatcgctcaggctggatgactgggtgctgtgccacctgtacaacaagaagaacgagtgggagaagatgcagctggggaagacggagtccgccgccggcgccgtgcccaaggaggaggctatggacatgaccacctcccactcgcactcgcagtcccactcgcactcgtggggcgagacgcgcacgccggagtcggagatcgtggacaacgaccccttcccggagctggactcgttcccggcgttccaggaccccgcggcggcgatgatggtgcccaagaaggagccgcacgcggacgacggcaacaacaacaacgccgccgccaagaacagcaacctgttcgtggacctcagctacgacgacatccagagcatgtacagcgggctcgacatgctgccgccgcccggggaggacttctactcgtcgctcttcgcgtcgccgagggtcaaggggaaccagcccgcgggcgccgctgggttggccccgttctgagaatctgagctgacgcggcacggcaaccatgtgaggatggtggatgatggccgacgaggagaggagacggcgccccaaggctgcggcggcgacctctgtaaatacagcgtaggagtcgaagaagaacctgaaccacggaacctgatcggggtcgcagggttaagagtgtcggtgtagcgtacatggagccggccccggtgggtggcgccaggctcattcttttgttttcacctttcacctgagacgatagatactcgatcgtatatgtgtagctctttcctcttcaacagaaccgacgaaattttgctgttcctcttt

SEQ ID NO: 40 - protein, 316 aa, Panicum virgatum
MGVPVRRERDAEAELNLPPGFRFHPTDDELVEHYLCRKAAGQRLPVPIIAEVDLYKFDPWDLPERALFGTREWYFFTPRDRKYPNGSRPNRAAGNGYWKATGADKPVAPRGRTLGIKKALVFYAGKAPRGVKTDWIMHEYRLADAGRAAAAKKGSLRLDDWVLCHLYNKKNEWEKMQLGKTESAAGAVPKEEAMDMTTSHSHSQSHSHSWGETRTPESEIVDNDPFPELDSFPAFQDPAAAMMVPKKEPHADDGNNNNAAAKNSNLFVDLSYDDIQSMYSGLDMLPPPGEDFYSSLFASPRVKGNQPAGAAGLAPF

SEQ ID NO: 41 - protein, 299 aa, Zea mays
MGQPVTRRRERDAEAELDLPPGFRFHPTDNELVEHYLCRKAAGQRLPVPIIAEVDLYRFDPWDLPERALFGTREWYFFTPRDRKYPNGSRPNRAAGDGYWKATGADKPVASRAAARTLGIKKALVFYAGKAPRGVKTDWIMHEYRLADAGRRAKKGSLRLDDWVLCRLYNKKNEWEKMRLGKGAAAGAVKEEEAMDMSTSHSQITHSWGETRTPESEIVDNDLPFPDPAMMVPKKERVDDGGSARTSDLFVDLSYDDIQGMYSGLDMLPPVGEDLYSSLFASPRVRGNQPTGAAGLGPF

SEQ ID NO: 42 - protein, 329 aa, Triticum aestivum
MGMPAVRRRERDAEAELNLPPGFRFHPTDDELVEHYLCRKAAGQRLPVPIIAEVDLYRFDPWALPDRALFGTREWYFFTPRDRKYPNGSRPNRAAGNGYWKATGADKPVAPRGGRTMGIKKALVFYAGKAPKGVKTDWIMHEYRLADAGRAAASKKGSLRLDDWVLCRLYNKKNEWEKMQLQQQGEEETMMEPKAENTASDMVVTSHSHSQSQSHSHSWGEARTPESEIVDNDPSLFQQATAAAFQAQSPAAAAAHQEMMATLMVPKKEAADEAGRNDLFVDLSYDDIQSMYNGLDMMPPGDDLLYSSLFASPRVRGSQPGAGGMPAPF

SEQ ID NO: 43 - protein, 302 aa, Zea mays
MGQPVTRRRERDAEAELDLPPGFRFHPTDDELVEHYLCRKAAGQRLPVPIIAEVDLYRFDPWDLPERALFGAREWYFFTPRDRKYPNGSRPNRAAGDGYWKATGADKPVAPRAAAADARTLGIKKALVFYAGKAPRGVKTDWIMHEYRLADAGRRAKKGSLRLDDWVLCRLYNKKNEWEKMRLGKGAAAGAVKEEEAMDMSTSHSQITHSWGETRTPESEIVDNDLPFPDPAMMVPKKERVDDGGSARTSDLFVDLSYDDIQGMYSGLDMLPPAGEDLYSSLFASPRVRGNQPTGPAGLGPF

SEQ ID NO: 44 - protein, 327 aa, Triticum aestivum
MGMPAVRRRERDAEAELNLPPGFRFHPTDDELVEHYLCRKAAGQRLPVPIIAEVDLYRFDPWALPDRALFGTRVWYFFTPRDRKYPNGSRPNRAAGNGYWKATGADKPVAPRGGRTMGIKKALVFYAGKAPKGVKTDWIMHEYRLADAGRAAASKKGSLRLDDCVLCRLYNKKNEWGKMQLQQQGGEEMMVEPKAENTASDMVVTSHSHSQSQSHSHSWGEARTPESEIVDNDPSLFQQAAAFQAQSPAAAAAHQEMMATLMVPKKEAAEEAGRNDLFVDLSYDDIQSMYNGLDMMPPGDDLLYSSLFASPRLRGSQPGAGGMPAPF

SEQ ID NO: 45 - protein, 303 aa, Elaeis guineensis
MGSRRRDAEAELNLPPGFRFHPTDEELVVHYLCKKVACQRLPVPIIAEVDLYKYDPWDLPEKALFGLKEWYFFTPRDRKYPNGSRPNRAAGRGYWKATGADKPVTPKGSSRPLGIKKALVFYSGKAPRGVKTDWIMHEYRLADTNRAANKKGSLRLDDWVLYRLYNKKNTWEKMQQQKEAASFGETMDSVDDTGSDSFRTPESDIDNDVMFPDFDDMAQVGAHPPQAFNGMQGVRVNNITGYQPAIEQRPKEENDWFTDLNLDDFHSTCMAFGSTPALDMSDHDYYYSNLPQLRSNQSDLLPF

SEQ ID NO: 46 - DNA, 660 bp, Zea mays
ttccctcacctcccgcagcagctagccgccagccaacaaccgaaccaaccaaccaacccacaggccacagcgagcgagtaaagcgtccaatggtagcgatggcggccgtgcagcagcagcagcagcagcagcgccgcgacgcggaggcggagctcaacctgcccccgggcttccggttccacccgacggacgaggagctggtggcgcactacctctgcgcgcgcgccgcggggcgccgcccgccggtgtccatcatcgccgaggtcgacctgtaccgcttcgacccctgggacctgccggagcgcgccctcttcggccgccgcgagtggtacttcttcacgccgcgggaccgcaagtaccccaacggctcccgccccaaccgcgccgccgggtcgggctactggaaggccacgggcgcggacaagcccgtggagcacgggggccggacggcggggatcaagaaggcgctcgtgttctaccacggcaagccgccgcgcggggtcaagacggagtggatcatgcacgagtaccgcctcgccggcgacgcgaagaagtccggcgccggcacgctcaggctggatgactgggtgctgtgccgcctgtacacaagaagaacgagtgggagaagatgcagcagcagaaggagaaggagaagaaggc

SEQ ID NO: 47 - protein, 190 aa, Zea mays
MVAMAAVQQQQQQQRRDAEAELNLPPGFRFHPTDEELVAHYLCARAAGRRPPVSIIAEVDLYRFDPWDLPERALFGRREWYFFTPRDRKYPNGSRPNRAAGSGYWKATGADKPVEHGGRTAGIKKALVFYHGKPPRGVKTEWIMHEYRLAGDAKKSGAGTLRLDDWVLCRLYTRRTSGRRCSSRRRRRRR

SEQ ID NO: 48 - protein, 316 aa, Oryza sativa
MAAAVGGSGRRDAEAELNLPPGFRFHPTDEELVVHYLCRKVARQPLPVPIIAEVDLYKLDPWDLPEKALFGRKEWYFFTPRDRKYPNGSRPNRAAGRGYWKATGADKPVAPKGSARTVGIKKALVFYSGKAPRGVKTDWIMHEYRLADADRAPGGKKGSQKLDEWVLCRLYNKKNNWEKVKLEQQDVASVAAAAPRNHHHQNGEVMDAAAADTMSDSFQTHDSDIDNASAGLRHGGCGGGGFGDVAPPRNGFVTVKEDNDWFTGLNFDELQPPYMMNLQHMQMQMVNPAAPGHDGGYLQSISSPQMKMWQTILPPF

SEQ ID NO: 49 - protein, 316 aa, Oryza sativa
MAAAVGGSGRRDAEAELNLPPGFRFHPTDEELVVHYLCRKVARQPLPVPIIAEVDLYKLDPWDLPEKALFGRKEWYFFTPRDRKYPNGSRPNRAAGRGYWKATGADKPVAPKGSARTVGIKKALVFYSGKAPRGVKTDWIMHEYRLADADRAPGGKKGSQKLDEWVLCRLYNKKNNWEKVKLEQQDVASVAAAAPRNHHHQNGEVMDAAAADTMSDSFQTHDSDIDNASAGLRHGGCGGGVFGDVAPPRNGFVTVKEDNDWFTGLNFDELQPPYMMNLQHMQMQMVNPAAPGHDGGYLQSISSPQMKMWQTILPPF

SEQ ID NO: 50 - protein, 369 aa, Eleusine coracana
MTMGGGMMSVPVRRERDAEAELNLPPGFRFHPTDDELVEHYLCRKAAGQRLPVPIIAEVDLYKFDPWDLPDRALFGTGEWYFFTPRDRKYPNGSRPNRAAGNGYWKATGADKPVAPKGRTLGIKKALVFYAGKAPRGVKTDWIMHEYRLADAGRAAAAKKGSLRLDDWVLCRLYNKKNEWEKMQMKKGYRRRHCHCKGGGSRRRHDHLLELALALVGRDPHAGVGDRGQRPVPGARLVPGVPGPGTAAASAADDGAQERRGWTTPPPPARHPSLHRPPAMTTSRACTSGLDMLPPPGGGLLLLALRVAQGQGEPDRPASVAWPPSEVMLSGARWCCWNHHHQSSRRDRPSDERQDGGGGDFAGLQLRPL

SEQ ID NO: 51 - DNA, 731 bp, Panicum virgatum
aaagaacatcgacgaatccacaggacacagccagagctcgctctcaaccagcagcagcagccggagctgaggagagcgttgcggtttcagagtgggagggagaaatcaaggagccagcttcagtctgccgatcaattgcagcttcatcttcgccggccgatcagcgatcgccatgggagtgccggtgaggagggagagggacgcggaggcggagctgaacctcccgccggggttccggttccacccgacggacgacgagctggtggagcactacctgtgccggaaggcggcggggcagcgcctcccggtgcccatcatcgcggaggtggacctgtacaagttcgacccctgggacctgccggagcgcgcgctgttcggcacccgggagtggtacttcttcacgcccagggaccgcaagtaccccaacggctcgcgccccaaccgcgccgccgggaacggctactggaaggccaccggcaccgacaagcccgtcgctccgcgggggcgcacgctggggatcaagaaggcgctcgtgttctacgccggcaaggcgccgcgcgggatcaagaccgactggatcatgcacgagtacaggctcgccgacgccggccgcgccgccgcagccaagaaggggtcgctcaggttggatgactgggtgctgtgccgcctgtacaacaagaagaacgagtgggagaagatgcagctggggaaggagtccgccgcccggcgcg

SEQ ID NO: 52 - protein, 186 aa, Panicum virgatum
MGVPVRRERDAEAELNLPPGFRFHPTDDELVEHYLCRKAAGQRLPVPIIAEVDLYKFDPWDLPERALFGTREWYFFTPRDRKYPNGSRPNRAAGNGYWKATGTDKPVAPRGRTLGIKKALVFYAGKAPRGIKTDWIMHEYRLADAGRAAAAKKGSLRLDDWVLCRLYNKKNEWEKMQLGKESAARR

SEQ ID NO: 53 - DNA, 1261 bp, Triticum aestivum
acttacttggtcgccaaggaaacgagccatcaacaaaagagaaggctccaggtcccaggaggcggtatcacaacctgcagccgcctttctcttctcttcttcttctcttccagcaccgggcgggcgcggccggggttttcttttctccaaggtggtggagcgggcgagcgaacgcgaggagggggaggatgatgacggcaatggtgaaggccgagccgacggcggcggaggggagcagcgggcggagggacgcggaggcggagctcaacctgccgccgggcttccgcttccaccccacggacgacgagctcgtcgtgcactacctctgcaggaaggtggcgggccagccgcagcccgtgcccatcatcgccgaggtcgatctctacaagttcaacccctgggatctgcccgagagggcgctgttcgggagcagggagtggtacttcttcacgccacgcgaccgcaagtaccccaacggctcgcgccccaaccgctccgccggcaccggctactggaaggccaccggcgccgacaagcccgtggcgcccaaggagagcggcggcaggacggtcggcatcaagaaggcgctcgtcttctactccggcagggcgcccaggggcgtcaagaccgactggatcatgcacgagtaccgcatcgccgaagccgaccgcgcacccggcaagaagggatccctcaagctggacgaatgggtgctgtgccggctgtacaacaagaagaacaactgggagaaggtcaaggtggagcaggacatggctgtggaggccgggccaaacggggaggtcatggacgcgctggcgaccgacgccatatccgacagcttccagacgcacgactcctcggagatcgacagcgcctccggcctgcagcagcgcgtcttcacggacatggcgcaggggcagccgagaggcggcatggtgacggtgaaggaggacagcgactggttcaccggcctgagcatggacgacctgcagacttgctatatgaacatggggcagatggtgaacccggcgacgatgcctgggcaggacggcagcggctacctacagtcgatgagctcaccgcagatgatgaggccgatgtggcaaacaatcttgccaccattctgagatggaaccagaaagatatggtgtaaattattggaaatagaagtgattagacaaatatacttactttgttgaactagaaagagatagagatttcccaggcatgattctgaagatgtggtggtaggcttgtagcg

SEQ ID NO: 54 - protein, 308 aa, Triticum aestivum
MVKAEPTAAEGSSGRRDAEAELNLPPGFRFHPTDDELVVHYLCRKVAGQPQPVPIIAEVDLYKFNPWDLPERALFGSREWYFFTPRDRKYPNGSRPNRSAGTGYWKATGADKPVAPKESGGRTVGIKKALVFYSGRAPRGVKTDWIMHEYRIAEADRAPGKKGSLKLDEWVLCRLYNKKNNWEKVKVEQDMAVEAGPNGEVMDALATDAISDSFQTHDSSEIDSASGLQQRVFTDMAQGQPRGGMVTVKEDSDWFTGLSMDDLQTCYMNMGQMVNPATMPGQDGSGYLQSMSSPQMMRPMWQTILPPF

SEQ ID NO: 55 - protein, 314 aa, Triticum aestivum
MMTAMVKAEPTGAAAGAEGSSGRRDAEAELNLPPGFRFHPTDDELVVHYLCRKVAGQPQPVPIIAEVDLYKFNPWDLPERALFGSREWYFFTPRDRKYPNGSRPNRSAGTGYWKATGADKPVAPRESGGRTVGIKKALVFYSGRAPRGVKTDWIMHEYRIAEADRAPGKKGSLKLDEWVLCRLYNKKNNWEKLKVEQDMAVEAGPNGEVMDALATDAMSDSFQTHDSSEIDSASGLQQHGFMDMAQQQARMVTVKEDSDWFTGLSMDDLQTCYMNMGQMVNPTTMPGQNGSGYLQPMSSPQMMRPMWQTILPPF

SEQ ID NO: 56 - protein, 316 aa, Sorghum bicolor
MAMVAAAAEGSGRRDAEAELNLPPGFRFHPTDEELVVYYLCRKVARQQLPVPIIAEVDLYKFDPWDLPEKALFGRKEWYFFTPRDRKYPNGSRPNRAAGRGYWKATGADKPIAPKGSGRAAGIKKALVFYSGKAPRGIKTDWIMHEYRLADADRAPGKKGSQKLDEWVLCRLYNKKNNWEKVKVEPEPEAAAHHNRQSAAEDSMSDSFQTHDSDIDNASGMQQQQQQQQSFFGDMVQGQAMNMRNNGIGTVTVKEDNDWFTDLNLDDLQASYNMAHMVNPNPVVQTVNLVAGQGHGYLQSMSSPSMKMWQTILPPF

SEQ ID NO: 57 - protein, 335 aa, Elaeis guineensis
MGSRRRDAEAELNLPPGFRFHPTDEELVVHYLCKKVACQRLPVPIIAEVDLYKYDPWDLPEKALFGLKEWYFFTPRDRKYPNGSRPNRAAGRGYWKATGADKPVTPKGSSRPLGIKKALVFYSGKAPRGVKTDWIMHEYRLADTNRAANKKGSLRVCHRQSEIHKFFGFLGFFMNIDSDEKIHEFMQLDDWVLCRLYNKKNTWEKMQQQKEAASFGETMDSVDDTGSDSFRTPESDIDNDVMFPDFDDMAQVGAHPPQAFNGMQGVRVNNITGYQPAIEQRPKEENDWFTDLNLDDFHSTCMAFGSTPALDMSDHDYYYSNLPQLRSNQSDLLPF

SEQ ID NO: 58 - protein, 186 aa, Zea mays
MVMAPAAAQQQRRRDAEAELNLPPGFRFHPTDEELVAHYLCARAAGRRPPVSIIAEVDLYRFDPWDLPERALFGRREWYFFTPRDRKYPNGSRPNRAAGSGYWKATGADKPVEHGGRTVGVKKALVFYHGKPPRGVKTEWIMHEYRLADAGARARARKPGTGTLRVSGEHLAVSRRIFFLGFISSL

SEQ ID NO: 59 - protein, 278 aa, Hordeum vulgare
MVKAEAMTAEAEGSSGRRDAEAELNLPPGFRFHPTDDELVVHYLCRKVAGQPQPVPIIAEVDLYKFNPWDLPERALFGSREWYFFTPRDRKYPNGSRPNRSAGTGYWKATGADKPVAPRESGGRTVGIKKALVFYSGRAPRGVKTDWIMHEYRIAQADRTPGKKGSLKLDEWVLCRLYNKKNNWDKVKVEQDMAVVQGQNGEVMDALATDAMSDSFQTHDSSEIDNASGLQQQHHGFMDMAQRQAREGMVTVKEDSDWFTRPEYGRPADLLHEPWGRW

SEQ ID NO: 60 - DNA, 653 bp, Zea mays
agcagtcttccgcgggagcgagctgttgacaccgagtcggagtcggacggaggactggcaggcacaaccgaagccaccgcttctagttctcgggttcatcgccagcaatccagaccacataatgggactgccggtgacgaggaggagggagagggacgcggaggcggagctggacctgccgccggggttccggttccaccccaccgacgacgagctggtggagcactacctgtgccgcaaggcggcggggcagcgcctccccgtgcccatcatcgccgaggtggacctgtacaggttcgacccctgggacctgccggagcgcgcgctcttcggggcccgggagtggtacttcttcacgcccagggaccgcaagtaccccaacggctcccgccccaaccgcgccgccggcgacgggtactggaaggccaccggcgccgacaagcccgtcgcgccgcgcgccgccgacgcccgcacgctcgggatcaagaaggcgctcgtcttctacgccgggaaggcgccgcgcggggtcaagacggactggatcatgcacgagtacaggctcgccgacgccagtggccgcgccaagaaggggtcgctcaagttggatgactgggtgctgtgccggctgtacaacaagaagaacgagtgggaga

SEQ ID NO: 61 - protein, 177 aa, Zea mays
MGLPVTRRRERDAEAELDLPPGFRFHPTDDELVEHYLCRKAAGQRLPVPIIAEVDLYRFDPWDLPERALFGAREWYFFTPRDRKYPNGSRPNRAAGDGYWKATGADKPVAPRAADARTLGIKKALVFYAGKAPRGVKTDWIMHEYRLADASGRAKKGSLKLDDWVLCRLYNKKNEWE

SEQ ID NO: 62 - DNA, 691 bp, Zea mays
gacaacgcgattctatttatttatctggctgccagccagccagccgcctttcgaaaccgagcacgagggagccgacgtggtggtctctggaacctggttcgagcgagcgagcgacccatctatccagccgcctgccgggaatttctgtgacgacgacgaggaggaggagggggtatggcaatggtggcggcgcagggaggcggccggagggacgccgaggcggagctcaacctgccgccggggttccggttccatcccaccgatgaggagctggtggtgcactacctctgcaggaaggtggcgtgtcagcagctgcccgtgcccatcatcgccgaggtcgacctttacaaattcgacccgtgggatcttccagagaaggcgctgtttggccgcaaggagtggtacttcttcacgccgcgggaccgcaagtacccaaacggctcgcgccccaaccgcgccgccgggagggggtattggaaggcaacgggcgcggacaagccgatcgcgcccaagggcggtggcggggcggcaggaatcaagaaggctctcgtcttctactccggcaaggcgcccaggggattcaagaccgactggatcatgcatgagtaccgcctcgcggacgcggaccgtgcgccgggcaagaagggctcacggaagttggatgagtgggtgttgtgccggctgtacaaca

SEQ ID NO: 63 - protein, 172 aa, Zea mays
MAMVAAQGGGRRDAEAELNLPPGFRFHPTDEELVVHYLCRKVACQQLPVPIIAEVDLYKFDPWDLPEKALFGRKEWYFFTPRDRKYPNGSRPNRAAGRGYWKATGADKPIAPKGGGGAAGIKKALVFYSGKAPRGFKTDWIMHEYRLADADRAPGKKGSRKLDEWVLCRLYN

SEQ ID NO: 64 - protein, 306 aa, Malus x domestica
MERVQTTPIEMSSADLQLPPGFRFHPTDEELVRHYLCRKCASQPISVPIIAEIDLYKYDPWELPGLALYGEKEWYFFSPRDRKYPNGSRPNRAAGSGYWKATGADKPIGHPKPVGIKKALVFYAGKAPRGEKTNWIMHEYRLADVDRSPRKKNSLRLDDWVLCRIYNKKGTVENQQPQQQQEQQRTTSRNASSGSEFEDRKPDNLRCPPPPASVVPSRHVSDYVYFDNSDSVPKLHTDSSCSEQVVSPELACEVQSEPKWKEWEKALEMPYSYMDTTVENGFGAQFQSGNEMSPLQDIFMYLQKPY

SEQ ID NO: 65 - protein, 299 aa, Vitis vinifera
MTAELQLPPGFRFHPTDEELVMHYLCRKCASQSIAVPIIAEIDLYKFDPWQLPEMALYGEKEWYFFSPRDRKYPNGSRPNRAAGTGYWKATGADKPIGHPKPVGIKKALVFYAGKAPRGEKTNWIMHEYRLADVDRSARKKNNSLRLDDWVLCRIYNKKGIVEKQHTAARKSDCSDVEDQKPGPLALSRKVGAMPPPPPPSSSTAPTATAALDDLVYFDSSDSVPRLHTDSSCSEHVVSPEFTCEREVQSEPKWKEWENPMDFSYNYMDATVDNAFLSQFPNNQMSPLQDMFMYLQKPF

SEQ ID NO: 66 - protein, 263 aa, Vitis vinifera
MTAELQLPPGFRFHPTDEELVMHYLCRKCASQSIAVPIIAEIDLYKFDPWQLPEMALYGEKEWYFFSPRDRKYPNGSRPNRAAGTGYWKATGADKPIGHPKPVGIKKALVFYAGKAPRGEKTNWIMHEYRLADVDRSARKKNNSLRLDDWVLCRIYNKKGIVEKQHTAARKSDCSDVGAMPPPPPPSSSTAPTATAALDDLVYFDSSDSREVQSEPKWKEWENPMDFSYNYMDATVDNAFLSQFPNNQMSPLQDMFMYLQKPF

SEQ ID NO: 67 - protein, 289 aa, Oryza sativa
MAAAVGGSGRRDAEAELNLPPGFRFHPTDEELVVHYLCRKVARQPLPVPIIAEVDLYKLDPWDLPEKALFGRKEWYFFTPRDRKYPNGSRPNRAAGRGYWKATGADKPVAPKGSARTVGIKKALVFYSGKAPRGLDEWVLCRLYNKKNNWEKVKLEQQDVASVAAAAPRNHHHQNGEVMDAAAADTMSDSFQTHDSDIDNASAGLRHGGCGGGGFGDVAPPRNGFVTVKEDNDWFTGLNFDELQPPYMMNLQHMQMQMVNPAAPGHDGGYLQSISSPQMKMWQTILPPF

SEQ ID NO: 68 - DNA, 1397 bp, Glycine max
acgtttcaaatcgcagtctcagagcaaagcagagccaagaagaagaagaagaaaaccaacataatcaacaacaacaacaacaaaaagcttgcaaattagaagaatcttcagttaaaagggaagaagaacacacaagaagaaagagaagaagaaacgcgcgcgaatgaagggagaattagagttgccacctgggttcagatttcaccccactgatgaagaattggtgaatcactacttgtgtaggaagtgcgctggtcaaccaatcgcggttcccgtcatcaaagaggtcgatttgtacaagtttgatccatggcagcttccagaaattggtttttacggcgagaaagaatggtacttcttttctcctcgggaccggaaatacccgaacggttcacggccgaaccgcgccgccggaagcggctattggaaagccaccggcgctgataaaccgatcggaaaaccgaaagcgcttgggatcaagaaagctctggttttttacgccggaaaagcccccaaaggtgtgaaaaccaattggattatgcacgaatatcgcctcgccaatgttgaccgatctgcctccaagaaaaaaaacaacaacttgaggcttgatgattgggtgttgtgtcgaatctacaacaagaaagggaagattgagaaatacaacacaggcgcagcgaagatgaatgttgagatggttcatagttttgagcacgagaacgagacgaagccagagattcataagctaggaaatgagcaattgtacatggagacttcggattcggtgccaaggttgaacacggactcgagcagttcggagcacgtggtttcgcccgatgtcacgtgcgagagggaggtgcagagcgaccccaagtggaacgatgatctggacctaaagctagaaaacgcgtttgattttcagtttaattacttggacgataataacctttccgtggatgattacctttttggcactgttcagtatcaaatgggccagctctcgcccttgcaggacatgttcatgtacctacagaagatgtgaaaactgaaaacgaaacgttttgagcaacatgggacccgcaaatatctttgttttattatttttttaaaaggaaaagtcagcatttgtatgcaattgcattgcacctaacatgtgatgtgggctaggccaagcttagcaactattcttattctttgttctagagagatgagggaatgttgaattcggctgaaatgggctatttggattggttcttggtgtaaagaaaaaatgagagaaggagattaggtgctgcagtaagtaaaaagtaagtgagcaaattgatgataggttattggagggttaatgtgtgggtgtaaggactcacttaggaaaattcttgttccattgctattccagc

SEQ ID NO: 69 - protein, 291 aa, Glycine max
MKGELELPPGFRFHPTDEELVNHYLCRKCAGQPIAVPVIKEVDLYKFDPWQLPEIGFYGEKEWYFFSPRDRKYPNGSRPNRAAGSGYWKATGADKPIGKPKALGIKKALVFYAGKAPKGVKTNWIMHEYRLANVDRSASKKKNNNLRLDDWVLCRIYNKKGKIEKYNTGAAKMNVEMVHSFEHENETKPEIHKLGNEQLYMETSDSVPRLNTDSSSSEHVVSPDVTCEREVQSDPKWNDDLDLKLENAFDFQFNYLDDNNLSVDDYLFGTVQYQMGQLSPLQDMFMYLQKM

SEQ ID NO: 70 - protein, 296 aa, Solanum lycopersicum
MTAAELQLPPGFRFHPTDEELVTHYLCRKCTSQPIAVPIVAEIDLYKFDPWDLPDLALYGEKEWYFFSPRDRKYPNGSRPNRAAGTGYWKATGADKPIGNPKAVGIKKALVFYSGKAPKGEKTNWIMHEYRLADVDRSARKNNNSLRLDDWVLCRIYNKKGSIEKNRKMNTTCYMDKVGSPEDRKPEILPPLPPHPQPQQLHNDFFYLPSDSVPKMHSDSSCSEHVLSPEFTCEREVQSEPKLTDWEKATLDLPFNYMDATTGATTVDNSLLGSQFQSSYQMSPLQDMFMHLHKPF

SEQ ID NO: 71 - DNA, 1253 bp, Zea mays
tccagaccacataatgggacagccggtgacgaggaggagggagagggacgcggaggcggagctggacctgccgccggggttccggttccaccccacagacgacgagctggtggagcactacctgtgccgcaaggcggcggggcagcgcctccccgtgcccatcatcgccgaggtggacctgtacaggttcgacccgtgggacctgccggagcgcgcgctcttcggggcccgggagtggtacttcttcacgcccagggaccgcaagtaccccaacggctcccgccccaaccgcgccgccggcgacgggtactggaaggccaccggcgccgacaagcccgtcgcgccgcgcgccgccgccgccgacgcccgcacgctcgggatcaagaaggcgctcgtcttctacgccggcaaggcgccgcgcggggtcaagacagactggatcatgcacgagtacaggctcgctgacgccggccgccgcgccaagaaggggtcgctcagggtaagtttctacacacaaaaaaaagagagggctgaacgaggaattttttagcttttaattctgtcttggatcgatctgtgtgtgtgcagttggatgactgggtgctgtgccggctgtacaacaagaagaacgagtgggagaagatgcggctggggaagggggcagccgccggcgcagtcaaagaggaggaggccatggacatgagcacctcccactcgcagatcacccactcgtggggcgagacgcgcacgccggagtcggagatcgtggacaacgacctgccgttcccggatccggcgatgatggtgcccaagaaggagcgggtggacgacggcggcagcgccaggaccagcgacctgttcgtggatttcagttacgacgacatccaaggcatgtacagcggcctcgacatgctgccgccggccggcgaggacttgtactcctcgctcttcgcgtcgcccagggtcagggggaaccagcccaccggacccgcggggttgggccccttctgagtgagctcaggcgaggatggaggcatggagatcaggagagaagacggacggcgttgccaactctgtaaatacagcataggacgaggagtcgaacctgactgaacctggtcggggttacaagtcgagtgtgtcggtgtttcgtacatgggaaccgggccttacatgggagccggcccggtcttggtttggcgctggctcattctttagtttcacttcctgcgcagacggtagatgtgtatgca

SEQ ID NO: 72 - protein, 178 aa, Zea mays
MGQPVTRRRERDAEAELDLPPGFRFHPTDDELVEHYLCRKAAGQRLPVPIIAEVDLYRFDPWDLPERALFGAREWYFFTPRDRKYPNGSRPNRAAGDGYWKATGADKPVAPRAAAADARTLGIKKALVFYAGKAPRGVKTDWIMHEYRLADAGRRAKKGSLRVSFYTQKKERAERGIF

SEQ ID NO: 73 - protein, 295 aa, Glycine max
MKGELELPPGFRFHPTDEELVNHYLCRKCAGQPIAVPIIKEVDLYKFDPWQLPEIGYYGEKEWYFFSPRDRKYPNGSRPNRAAGSGYWKATGADKAIGKPKALGIKKALVFYAGKAPKGVKTNWIMHEYRLANVDRSASKKNNNNLRLDDWVLCRIYNKKGKIEKYNTTAPKMNLEMIHSFEHENETKPEIHKLGNEQLLYTETSDSVPRLHTDSSSSEHVVSPDVRYEREVQSDPKWNSDDYDLGLQLENAFDFQFNYLDDNNLSVDDDPFGTVQYQMGQLSPLQDVFMYLQKM

SEQ ID NO: 74 - DNA, 1451 bp, Gossypium hirsutum
ttttcaagagccgtcaccgcgtagaataccaaagaagtttgtagaaaaaaacaccgagagcgagtgtgaaaaagctcaaaaactagtttattaccttcaaggtgaaaagttcaaaaaatgacagcatcggagttacagctgccacctggattccgattccatccaaccgacgaagagcttgtgatgcactatctttgccggaaatgtgcatcgcagtccatcgctgtgccgattatcgctgaaatcgatctttacaaatacgatccttgggaccttccagatttggcgttgtacggagagaaagaatggtattttttctccccgagggataggaaatatccgaacggttcacggcctaaccgggcagctggttctgggtactggaaggcaaccggagctgacaaaccgattgggcagccgaagccggtcgggattaagaaggctttggtgttttacgctgggaaggcacctaaaggagagaaaaccaattggattatgcacgagtatcggttagctgacgtggaccgatcggctcgcaagaagaacagtttaaggttggacgattgggtgctttgccggatttataacaagaaaggcgccatcgagaaacagtcaccgcaaggaagcattggcaaaagctctgccgtgacggagatcgaagacaagaagccggatatagcgacacttggcgtggacacgcgccagctgcccccgcctcctacggggctaggtaacgattacgtgtactttgacacgtcggagtcggtgccgagactccacacggactcaagctgttcggagcacgtggtgtcaccggagttcacgtgcgaggttcaaagcgagccgcaatggaaggactggggaagtgctaccaacaccaccaccaccaatgcccttgacttcccttataattacatggatgccactgttgataacgggtttcctgcccatttccagagtaataatcagctgtccccgctccaggacatgttcatgtacctgcagaagccattttagaggggaaaaaaatgaaataaaaaggggtatattgttggaagtcaaaacgatgatggtgagctgcgtttcagggttacaggagactgaaagtcaatgagtgtaactgagaagggttgcgcatagattaaataacgaattgaaaaattgaaattgataatattgcagatgggaatggatggcggtggaagtaggatcttatgcaatctagaaaagtagagattagaataggcatgtgtacagataatctgtgatcacgtgtttaggggtttatgttcatgataaatgggtggggggaagaaaagttaaaaaaacaaagttttgggagggtctttttactttgaaggctttccaattattcttgtattttgtagcagaaaaaagattccataatttctttcaaaattcttagtaataatttatgttatttgagatag

SEQ ID NO: 75 - protein, 299 aa, Gossypium hirsutum
MTASELQLPPGFRFHPTDEELVMHYLCRKCASQSIAVPIIAEIDLYKYDPWDLPDLALYGEKEWYFFSPRDRKYPNGSRPNRAAGSGYWKATGADKPIGQPKPVGIKKALVFYAGKAPKGEKTNWIMHEYRLADVDRSARKKNSLRLDDWVLCRIYNKKGAIEKQSPQGSIGKSSAVTEIEDKKPDIATLGVDTRQLPPPPTGLGNDYVYFDTSESVPRLHTDSSCSEHVVSPEFTCEVQSEPQWKDWGSATNTTTTNALDFPYNYMDATVDNGFPAHFQSNNQLSPLQDMFMYLQKPF

SEQ ID NO: 76 - DNA, 906 bp, Gossypium hirsutum
atgaacaaaggagcaaacggaaatcagcaattggagttaccggcgggattcagattccatccgacagacgacgaattggtgcagcactatctctgcaggaaatgcgccggacagtcgattgctgtatcaattatagctgaaattgatctttacaagtttgatccatggcagttgcctgagaaggctttgtacggtgaaaaagagtggtattttttctcaccaagggatagaaaatatccgaacggttcacggccgaaccgagcagcaggaaccggttattggaaggcaaccggagctgataaaccggtgggaaaacccaaaaccttagggataaagaaggcacttgtgttctatgccggaaaagcacccagaggtataaaaacaaattggattatgcacgagtaccgcctcgccaacgtggaccgctctgctggcaagaacaataacttgaggcttgatgattgggtattgtgtcgaatatacaacaagaaaggcacacttgagaagcattacaatgtggacaacaaggaaactacaagctttggagaatttgatgaagaaataaaaccaaaaatattgcccacacaattagcaccgatgccaccacggcctcgatcgacaccagcaaacgactacttttatttcgagtcatcagagtcgatgactagaatgcacacgacaaactcgagctctggctcagagcatgtcttgtcgccatgtgacaaggaggttcagagcgcgcccaaatgggacgaagaccacagaaacacccttgattttcagctaaactatttggatggtttactaaatgaaccatttgaaacccaaatgcagcagcaaatttgcaactttgaccagttcaacaatttccaagacatgttcctatacatgcaaaaaccttactaa

SEQ ID NO: 77 - protein, 301 aa, Solanum lycopersicum
MNKGANGNQQLELPAGFRFHPTDDELVQHYLCRKCAGQSIAVSIIAEIDLYKFDPWQLPEKALYGEKEWYFFSPRDRKYPNGSRPNRAAGTGYWKATGADKPVGKPKTLGIKKALVFYAGKAPRGIKTNWIMHEYRLANVDRSAGKNNNLRLDDWVLCRIYNKKGTLEKHYNVDNKETTSFGEFDEEIKPKILPTQLAPMPPRPRSTPANDYFYFESSESMTRMHTTNSSSGSEHVLSPCDKEVQSAPKWDEDHRNTLDFQLNYLDGLLNEPFETQMQQQICNFDQFNNFQDMFLYMQKPY

SEQ ID NO: 78 - protein, 291 aa, Camellia sinensis
MASELQMPPGFRFHPTDEELVMHYLCRKCASQSIAVPIIAEIDLYKYDPWELPGLALYGEKEWYFFSPRDRKYPNGSRPNRAAGSGYWKATGADKPIGHPKPVGIKKALVFYAGKAPRGEKTNWIMHEYRLADVDRSARKKCNNSLRLDDWVLCRIYNKKGSIEKQNTVIDKKLSEIPEMFEQKPQILNHHGGGVMLSPPPESPPATRMFSELVYRDTSDSIPRLHTDSSCSEHVVSPEFTCEREVQSEPSKLTDWEKAALDFPFNYMDATMDNAFTSPLQDMFMYLQKPF

SEQ ID NO: 79 - protein, 300 aa, Ipomoea batatas
MKNNGGILNNNEQQQQQQLEMPPGFRFHPTDEELVVHYLCRKCASQSISVPIIAEIDLYKFDPWQLPDMALYGEKEWYFFSPRDRKYPNGSRPNRAAGTGYWKATGADKPVGRPKTLGIKKALVFYAGKAPKGVKTNWIMHEYRLANVDRSAGKKNNLRLDDWVLCRIYNKKGTVEKYYNAADQNDIILPKVEDQKPNINQFSQSGTMLKQAALPPMVQNQHDYMHFDTSESVLRWHTDSSCCSEQVLSSPEFAADKEVQSAPKWDDLDFQLNNFIDDPFQVPQYNDPFQDMFTYMHKPF

SEQ ID NO: 80 - DNA, 1240 bp, Gossypium hirsutum
caaaaaaccacccagtaccaacagccaacaacacaaagaaggcaaacttacagcttttttgaagaggatcagctctagaaagttaagtctaaaaaggaagaagagtttaaagagttcagagaatgaaggcagagttagagttgccacctggtttcagattccatcctacagatgacgaactggtgaatcattatttgtgtaggaaatgtgcttctcagcctatttctgtgcccatcattgctgagattgatctttacaagtttgatccatggcagcttccagatatggcgttgtatggtgaaaaagagtggtatttcttttctccaagggatcgaaaatacccaaatgggtgtcggccgaacagggcggctggaaccggatactggaaagcgaccggagccgataagcccatcggaaagcccaagacactgggcataaaaaaagcactcgttttctacgctggtaaagccccacgcggtgtcaaaaccaactggattatgcacgagtatcgcctcgccaatgttgataggtccgccggcaagaaaagcaacaacttgaggcttgatgattgggtgttatgtcgaatatacaacaaaaagggaagcatagagaaacattttccgagtgaacaaaaatcgttaagttacccagaaatggaagatgagaaaccggacatcataatgaatggtcaaaacatgcaacaaccatggtcggtgatggcgatgaagaacgatgtaatacaaacggatggttcggagtcgagttggtcggagcacgtgccgtcaccggaaatcacgtgggagaaagaagtgaaaagtgaagggagatggaatgagcttgatttcgggttggatttcatagatgaagacccatttgccagtcaagttgattaccaaatggagcaactgtcaccattgcaagacatgttcatgtatctacccaagacattttaagccaacgtagaccaaaaatcctacaattgtggggtccaatccaaattaaaaacatttttaatttagatccatgcacacacacattgccaaacgaacaatgggtcaaattcaaattcaatatgagggggtgggtgacaaacaattggatcgctcgtgggtgtaatataatatgagccgtccattttcttcattttgaatattcaacgaaattgtaggaatattcttgtaatatatgtagaccatttttttcaaatatgaatattatgaaatatgctatgttgctattt

SEQ ID NO: 81 - protein, 276 aa, Gossypium hirsutum
MKAELELPPGFRFHPTDDELVNHYLCRKCASQPISVPIIAEIDLYKFDPWQLPDMALYGEKEWYFFSPRDRKYPNGCRPNRAAGTGYWKATGADKPIGKPKTLGIKKALVFYAGKAPRGVKTNWIMHEYRLANVDRSAGKKSNNLRLDDWVLCRIYNKKGSIEKHFPSEQKSLSYPEMEDEKPDIIMNGQNMQQPWSVMAMKNDVIQTDGSESSWSEHVPSPEITWEKEVKSEGRWNELDFGLDFIDEDPFASQVDYQMEQLSPLQDMFMYLPKTF

SEQ ID NO: 82 - protein, 299 aa, Gossypium hirsutum
MTASELQLPPGFRFHPTDEELVMHYLCRKCASQSIAVPIIAEIDLYKYDPWDLPDLALYGEEEWYFFSPRDRKYPNGSRPNRAAGSGYWKATGADKPIGQPKPVGIKKALVFYAGKAPKGEKTNWIMHEYRLADVDRSARKKNSLRLDDWVLCRIYNKKGAIEKQSPQGSIGKSSAVTEIEDKKPDIATLGVDTRQLPPPPTGLGNDYVYFDTSESVPRLHTDSSCSEHVVSPEFTCEVQSEPQWKDWGSATNTTTTNALDFPYNYMDATVDNGFPAHFQSNNQLSPLQDMFMYLQKPF

SEQ ID NO: 83 - protein, 291 aa, Gossypium hirsutum
MTAATLELPPGFRFHPTDEELVLHYLCRKCSSQPIAVPIIAEIDLYKFDPWDLPGIALYGEKEWYFFTPRDRKYPNGSRPNRAAGRGYWKATGADKPIGQPKTVGIKKALVFYAGKAPKGEKTNWIMHEYRLADVDRSARKKNSLRLDDWVLCRIYNKKGTVEKQEQHLSVKKANPTEIEEDEKKQVVLLPPPQAPSSATGTVNDYMYFDTSDSVPRMHTDSSCSEHVVSPEFTCEVQSEPRWKEWGNVNALDNPYNYLDATMDIPFASQLQGDNQMSPLQDIFMHLQKPF

SEQ ID NO: 84 - protein, 290 aa, Gossypium hirsutum
MSELQLPPGFRFHPTDEELVMHYLCRKCASQSISVPIIAEIDLYKYDPWELPGLALYGEKEWYFFSPRDRKYPNGSRPNRSAGSGYWKATGADKPIGVPKPVGIKKALVFYAGKAPKGEKTNWIMHEYRLADVDRSVRKKKNSLRLDDWVLCRIYNKKGALERRGPPPPEVHGGGVTDEAVEEKPRLTEMGMPPPPQQTANEFVYFDTSDSVPKLHTTESSCSEHVVSPEFTSEVQSEPKWKDWSAATNGNNTLDFGYNYMDATVDNAFGGGSNQMFPLQDMFMYMQKPY

SEQ ID NO: 85 - protein, 369 aa, Ricinus communis
MWAIDTHAPPLERRTRVPAAVIEEKTRKKGKKRYRPRFQAPSPQRERKQESESIYSCSRSRISRVEEKGKQVKGKKNDMAAVLELPPGFRFHPTDEELVMHYLCRKCASQQIAVPIIAEIDLYKYDPWDLPGMALYGEKEWYFFSPRDRKYPNGSRPNRAAGSGYWKATGADKPIGQPKPVGIKKALVFYAGKAPKGEKTNWIMHEYRLADVDRSARKKNSLRLDDWVLCRIYNKKGTIEKQGQLSNKKIINYSPSNIIEDKKPEIMAPPPAPSSGTGTANDFVYFESSDSVPKLHTDSSCSEHVVSPEFTCEVQSEPKWKDWGSNVNALDFPFNYMDGSMDSAFASQFQNNNQMSPLQDMFMYLQKPF

SEQ ID NO: 86 - protein, 312 aa, Petunia x hybrida
MIKGVSGNQQLELPAGFRFHPTDEELVQHYLCQKCAGQPICVSIIAEIDLYKFDPWQLPEKALYGEKEWYFFSPRDRKYPNGSRPNRAAGTGYWKATGADKPVGKPRTLGIKKALVFYAGKAPRGIKTNWIMHEYRLANVDRSAGKSNNLRLDDWVLCRIYNKKGTLEKHYNVDNKEDVRFEEVEEDQKPNILTFSQRNEMLTQLAPAPMPPRPQSMPASDYFHFETSDSVTRMHTTNSSSNCSEHVLSSCDKEVQSAPTWEDLESALNYQLNYLDGFQDEPFGPQMQQQNCNIIDQFNPFHDMFMYMQKPY

SEQ ID NO: 87 - protein, 324 aa, Picea sitchensis
MREIGRMGCKSGPNSAQINLPPGFRFYPTDEELMVHYLCKRVASQPFPIPIIAEIDLYKFDPWQLPEKALFGEKEWYFFSPRDRKYPNGSRPNRAAGSGYWKATGTDKPVTAGLNRMKVGVKKALVFYKGKAPRGIKTNWIMHEYRLADSASKAAKRKGSIRLDDWVLCRIYEKHYASQKAVPKESNELSSCVDPEEDQYMAPVASNSPPDMDDNKLLINLPRINSLNRINSLLKFPSREIMKMPDPNYNQTEQQYSRAEADAGSNSGGQAIEYGQNSPFWRNQQFGYNYDQMAQNPFPQQLEHMPSLGANSSAFFASLAAELL

SEQ ID NO: 88 - protein, 298 aa, Glycine max
MPGELQLPPGFRFHPTDDELVNHYLCRKCAAQTIAVPIIKEIDLYKFDPWQLPEMALYGEKEWYFFSPRDRKYPNGSRPNRAAGSGYWKATGADKPIGNPKALGIKKALVFYAGKAPKGVKTNWIMHEYRLANVDRSASKKNTTTNNLRLDDWVLCRIYNKKGKIEKYNGVAVVDQKVAKLSEEEVQFQHETKPQIKMYGHDDFRNDQLYMDTSDSGPRLHTDSSCSEHVVSPDGTCEKEVQSEPKWNDLELGPDPALGFDFNFMDLTSDDAIAPQVQYQINHLSPWQEMFTYLPKTF

SEQ ID NO: 89 - protein, 268 aa, Glycine max
MAAATQLHLPPGFRFHLTDEELVVHYLCRKCASQEIAVPIIAEIDLYKYDPWDLPGMALYGKKEWYFFTPRDRKYPNGSRPNRSAGTGYWKATGADKPVGKPKPVGIKKALVFYAGKAPKGVKTNWIMHEYRLADVDRSVRKKNSLRLDDWVLCRIYNKKGAIEKQQPAPPPPSGVHKIECYEMEDVKPEYTAADCLYFEASDSVPRLHTTESSCSEQVVSAEFASEVQSERKRQGNSEFSYNYMDATLGNNQMSPLQDIFMYLSRPF

SEQ ID NO: 90 - protein, 353 aa, Oryza sativa
MSGGGEGAAAAERQELQLPPGFRFHPTDEELVMHYLCRRCAGLPIAVPIIAEVDLYKFDPWHLPRMALYGEKEWYFFSPRDRKYPNGSRPNRAAGSGYWKATGADKPVGTPRPVAIKKALVFYAGKAPKGDKTNWIMHEYRLADVDRSARKKNTLRLDDWVLCRIYNKKGGVEKPSGGGGGERSNMMSHGETASAGSPPEQKPAVLPPPPPPYAAAAPFSELAAFYDVRPSDSVPRAQGADSSCSEHVLTTSASSGGVVERPEVQSHPKIAELGPQVWRVRAPRFAAFDNTRATSQRFRPSSGEPSGRLGAACAVPTGRAWWWVAQIREVGSTARDRIKELICGEAMLVAHRR

SEQ ID NO: 91 - protein, 323 aa, Picea sitchensis
MREIGRMGCKSGPNSAQINLPPGFRFYPTDEELMVHYLCKRVASQPFPIPIIAEIDLYKFDPWQLPEKALFGEKEWYFFSPRDRKYPNGSRPNRAAGSGYWKATGTDKPVTAGLNRMKVGVKKALVFYKGKAPRGIKTNWIMHEYRLADSASKAAKRKGSIRLDDWVLCRIYEKHYASQKAVPKESNELSSCVDPEEDQYMAPVASNSPPDMDDNKLLINLPRINSLNRINSLLKFPSREIMKMPDPNYNQTEQQYSRAETDAGSNSGGQAIEYGQNSPFWRNQQFGYNYDQMAQNPFPQQLEHMPSLGANSSAFFASLAAEL

SEQ ID NO: 92 - DNA, 1227 bp, Arabidopsis thaliana
gatttcaatctttgagataaaccacaaagatcctccgattcgaaggtttataaaaactcaaaatcgaatcttatccacaagaaaacaacaaggtacttttccaaaaatgaaggcggagttgaatttgccggcgggattccgatttcatccgacggacgaagagcttgtcaagttctatctttgccggagatgtgcgtcagaaccgattaacgttccggttatcgcagagattgacttgtacaaattcaatccatgggagcttccagaaatggcgttgtacggtgagaaagaatggtacttcttctcgcatagagaccggaaatacccaaacgggtcgagaccaaaccgggcagctggaaccggttattggaaagcgactggagctgataaaccgatcggaaaaccgaagacgttagggattaagaaagcactcgtcttctacgcaggaaaagctccgaaagggattaaaacgaattggattatgcacgagtatcgtctcgctaatgtcgatcgatctgcttctaccaacaagaagaacaacttaagacttgatgattgggttttgtgtcggatatacaataagaaaggaacaatggagaagtatttaccggcggcggctgagaaaccgacggaaaagatgagtacgtcggactcaagatgctcaagtcacgtgatttcaccggacgtcacgtgttctgataactgggaggttgagagtgagcccaaatggattaatctggaagacgcgttagaggcatttaatgatgacacgtccatgtttagttccattggtttgttgcaaaatgacgcctttgttcctcagtttcagtaccagtcctccgatttcgtcgattcgtttcaggacccgttcgagcagaaaccgttcttgaattggaattttgctcctcaagggtaaaaataatcggcaaaaagttgaagcttttcagagtcttcgatcaccggcattgtgtcggatcctgacccggagaccaagtcgggtcatacgattacataatcgggttattgagatttccacatttggatttccgagactaaccaacttaacggattctggggtaattggggggttttgcacaggtgaatcacactgagtcagcaagtttcgattttttggttttgttttgtaatgattgattaaatgtctaaagatatcacgaagtagatacagaagaactgtaaaagcaattgtgaccaaccattatgaat

SEQ ID NO: 93 - protein, 269 aa, Arabidopsis thaliana
MKAELNLPAGFRFHPTDEELVKFYLCRRCASEPINVPVIAEIDLYKFNPWELPEMALYGEKEWYFFSHRDRKYPNGSRPNRAAGTGYWKATGADKPIGKPKTLGIKKALVFYAGKAPKGIKTNWIMHEYRLANVDRSASTNKKNNLRLDDWVLCRIYNKKGTMEKYLPAAAEKPTEKMSTSDSRCSSHVISPDVTCSDNWEVESEPKWINLEDALEAFNDDTSMFSSIGLLQNDAFVPQFQYQSSDFVDSFQDPFEQKPFLNWNFAPQG

SEQ ID NO: 94 - protein, 301 aa, Solanum tuberosum
MNKGATGNQQLELPAGFRFHPTDDELVQHYLCRKCAGQPIAVSIITEIDLYKFDPWQLPEKALYGEKEWYFFSPRDRKYPNGSRPNRAAGTGYWKATGADKPVGKPKTLGIKKALVFYAGKAPRGIKTNWIMHEYRLANVDRSAGKNNNLRLDDWVLCRIYNKKGTLEKHYNVDNKETASFGEFDEEIKPKILPTQLAQMPPRPRSTPTNDYFHFESSESMTRMHTTNSSSGSEHVLSPCDKEVQSAPKWDEDHRNTLDFQLNYLDGLLNEPFETQMQQQSCNFDQFNNFQDMFFYMQKPY

SEQ ID NO: 95 - DNA, 1191 bp, Glycine max
aagtttcaaacgccgcaaccaccacacaattcctacacatttctactctttagtttctccaattttctttctcaattctcaacaatggccactacaacacaacttcacttaccccctggattcagattccatccaacagatgaagaactcgtcatccactacctttgtcgcaaatgcgcttcgcaacatatcgcggttcccataatcgccgaaattgatctgtacaagtacgacccttgggaccttccaggaatggctttgtacggagagaaagagtggtattttttcacgccgagggaccgcaagtacccgaacggttcgcggccgaaccggtccgcgggaaccgggtactggaaggcaaccggagcggataaaccagttggtaaaccgaaaccggttgggatcaagaaagcgttggttttttacgctggaaaagcgcccaagggagagaaaactaactggatcatgcacgagtatcgtcttgcagacgtggatcgttccgttcgcaaaaagaacagcttaaggctggatgactgggtgctgtgccgaatttacaacaagaaaggtgcaattgaaaagcaacaactaccaccaccgagtggggtccgcaaaattgaatgttccgaaatggaggacgagaagccggagattctgccgccagatccgccgtatacggcggcgacggtggcggattgcctgtacttcgaggcttccgactcggtgccccggctgcacacgacggactcgagctgctccgagcaggtggtgtcggcggagtttgcgagcgaggtgcagagcgagccgaagaggggcagcaacaacaacaacgagtttgcatataattacgtggatgccactctcgggaataatcagatgtcgccgctgcaggatattttcatgtacctctccaagtccttctgcaattaacacgcaccaccaccacgacgagacgacgtcgttctgtgttgtgtgtatgcattatgcatttttgcagtagctgctccactgcaccatttgcacggaagcacgagactgagtgaagatccgtgagtgtgtccgtgctggttcgtgtagacgattattacaaaaaaaaacaaaaaagcaccaagatgaagaagaagaaagattcttatatgaacatgatgaattatgagtatattaaattaatgaagtattaatacatcattgagc

SEQ ID NO: 96 - protein, 280 aa, Glycine max
MATTTQLHLPPGFRFHPTDEELVIHYLCRKCASQHIAVPIIAEIDLYKYDPWDLPGMALYGEKEWYFFTPRDRKYPNGSRPNRSAGTGYWKATGADKPVGKPKPVGIKKALVFYAGKAPKGEKTNWIMHEYRLADVDRSVRKKNSLRLDDWVLCRIYNKKGAIEKQQLPPPSGVRKIECSEMEDEKPEILPPDPPYTAATVADCLYFEASDSVPRLHTTDSSCSEQVVSAEFASEVQSEPKRGSNNNNEFAYNYVDATLGNNQMSPLQDIFMYLSKSFCN

SEQ ID NO: 97 - protein, 296 aa, Solanum tuberosum
MTAAELQLPPGFRFHPTDEELVTHYLCRKCTSQPIAVPIVTEIDLYKFDPWDLPDLALYGEKEWYFFSPRDRKYPNGSRPNRAAGSGYWKATGADKPIGIPKAVGIKKALVFYSGKAPKGEKTNWIMHEYRLADVDRSARKNNNSLRLDDWVLCRIYNKKGSIEKNRKMNTTCYMDTVGSPEDRKPEILPPLPPPPQPQQLHNDFFYLPSDSVPKIHSDSSCSEHVLSPEFTCEREVQSEPKLTDWEKATLDLPFNYMDATTGATTVDNSLLGSQFQSCYQMSPLQDMFMHLHRPF

SEQ ID NO: 98 - protein, 298 aa, Triticum aestivum
MSGGQELNLPPGFRFHPTDEELVTHYLCRRCAGAPIAVPIITEIDLYKFDPWQLPKMALYGEKEWYFFSPRDRKYPNGSRPNRAAGSGYWKATGADKPVGTPKPLAIKKALVFYAGKAPKGEKTNWIMHEYRLADVDRSARKKNSLRLDDWVLCRIYNKKGGLEKPASVDRKPAAMGGYGGPPGAMVSSPQEQKPVMGMNANGGGGVQPFPDFAAYYDRPSDSMPRLHADSSCSEQMLSPDFPAGEVQSQPKISEWERSFASGGDPVNPAAGSMLEPNGGFGGDPLLQDILMYWGKPF

SEQ ID NO: 99 - protein, 298 aa, Triticum aestivum
MSGGQELNLPPGFRFHPTDEELVTHYLCRRCAGAPIAVPIITEIDLYKFDPWQLPKMALYGEKEWYFFSPRDRKYPNGSRPNRAAGSGYWKATGADKPVGTPKPLAIKKALVFYAGKAPKGEKTNWIMHEYRLADVDRSARKKNSLRLDDWVLCRIYNKKGGLEKPASVDRKPAAMGGYGGPPGAMVSSPQEQKPVMGMNANGGGGVQPFPDFAAYYDRPSDSMPRLHADSSCSEQVLSPDFPAGEVQSQPKISEWERSFASGGDPVNPAAGSMLEPNGGFGGDPLLQDILMYWGKPF

SEQ ID NO: 100 - protein, 280 aa, Glycine max
MATTTQLHLPPGFRFHPTDEELVIHYLCRKCASQHIAVPIIAEIDLYKYDPWDLPGMALYGEKEWYFFTPRDRKYPNGSRPNRSAGTGYWKATGADKPVGKPKPVGIKKALVFYAGKAPKGEKTNWIMHEYRLADVDRSVRKKNSLRLDDWVLCRIYNKKGAIEKQQLPPPSGVRKIECSEMEDEKPEILPPDPPYTAATVADCLYFEASDSVPRLHTTDSSCSEQVVSAEFASEVHSEPKRGSNNNNEFAYNYVDATLGNNQMSPLQDIFMYLSKSFCN

SEQ ID NO: 101 - DNA, 1005 bp, Sorghum bicolor
atgagcggcggcggcggcggaggccgagcgccggcggcgcagtcgcaggagctgcagctgccgccggggttccggttccacccgaccgacgaggagctggtgatgcactacctctgccggcgctgcgccgggcttcccatctccgtgcccatcatcgccgagatcgatctctacaagttcgacccctggcagctcccaaggatggcgctgtacggcgagaaggagtggtacttcttctcgccgcgggaccgcaagtacccgaacgggtcgcggccgaaccgcgccgccggcgccgggtactggaaggccaccggtgcagacaagccggtgggcacgccgaagccgttggccatcaagaaggcgctcgtcttctacgccggcaaggcgcccaagggcgacaagaccaactggatcatgcatgagtaccgcctcgccgacgtcgaccgcaccgcccgcaacaagaacaacagcctcaggttggatgattgggtactgtgccgaatctacaacaagaaaggcgtgccggagaggccggccggagccggcggggccgaggcgagcagccagcaaggcgcgcaggggtcgatgggctcgccgccggagcagaagccgtccgtgccgccgcatcccacggccggggcggggttatacgcgccgccgccgttctcggacctggcggcgtactgcgaggtccggccgtcggactccatgccccgggcgcacggcgcggactcgagctgctcgggccagggccacgcgctggccgccacgtcgtcgtcgtgcggcggcggcgagcggcctgaggtgcagagccagcccaagatcgccgagtgggagcgcacgttcgccggcgccggtgccggtccggggatcaacccggccggctcgatgctggggcttggcgggcatcatcagctcggcccggcggcggtgggggtggggcagctgcccgccggcgacccgctgctgcaggacatcctcacgtactggggcaaaccgtactga

SEQ ID NO: 102 - protein, 334 aa, Sorghum bicolor
MSGGGGGGRAPAAQSQELQLPPGFRFHPTDEELVMHYLCRRCAGLPISVPIIAEIDLYKFDPWQLPRMALYGEKEWYFFSPRDRKYPNGSRPNRAAGAGYWKATGADKPVGTPKPLAIKKALVFYAGKAPKGDKTNWIMHEYRLADVDRTARNKNNSLRLDDWVLCRIYNKKGVPERPAGAGGAEASSQQGAQGSMGSPPEQKPSVPPHPTAGAGLYAPPPFSDLAAYCEVRPSDSMPRAHGADSSCSGQGHALAATSSSCGGGERPEVQSQPKIAEWERTFAGAGAGPGINPAGSMLGLGGHHQLGPAAVGVGQLPAGDPLLQDILTYWGKPY

SEQ ID NO: 103 - protein, 176 aa, Sorghum bicolor
MAPAKFSTSSSQLHLPAGFRFHPTDEELVVHYLCKKAESKPFPVPVIAEVDLYKFSPWDLPSKAYFGEREWYFFTPRDRKYPNGARPNRAAGSGYWKATGTDKPIHTRGNRKVGVKKALVFYDGKAPKGVKTNWIMHEYRLVESSSHKPAKDHKSLRLDDWVLCRIYEKTSGAFKV

SEQ ID NO: 104 - protein, 276 aa, Gossypium hirsutum
MKAELELPPGFRFHPTDDELVNHYLCRKCASQPISVPIIAEIDLYKFDPWQLPDMALYGEKEWYFFSPRDRKYPNGCRPNRAAGTGYWKATGADKPIGGPKALGIKKALVFYAGKAPRGVKTNWIMHEYRLANVDRSAGKRSNNLRLDDWVLCRIYNKKGSIEKHFPSEQKSLSYPEMEDEKLGIIMNGQNMQQPWSVMAMKNDAIQTDGSESSWSEHVPSPEITWEKEVKSEGRWNELDFGLDFIDEDPFASQVDYQMEQLSPLQDRFMYLPKTF

SEQ ID NO: 105 - protein, 304 aa, Hordeum vulgare
MSGGQELNLPPGFRFHPTDEELVMHYLCRRCAGAPIAVPIITEIDLYKFDPWQLPKMAMYGEKEWYFFSPRDRKYPNGSRPNRAAGSGYWKATGADKPVGTPKPLAIKKALVFYAGKAPKGEKTNWIMHEYRLADVDRSARKKNSLRLDDWVLCRIYNKKGGMEKPASVDRKPVTMGGYGVGPGAMVSSPQEQKPVMGMNANGGGGGGVQPFPDFAAYYDRPSDSMPRLHADSSCSEQVLSPDFPGERGGGEVQSQPKISEWERSFASGGDPVNPAAGSILEPHGGFGGDPLLQDILMYWGKPF

SEQ ID NO: 106 - protein, 265 aa, Brassica napus
MKAELNLPAGFRFHPTDEELVKFYLCRRCASEPITVPVIAEIDLYKFNPWELPDKALYGEKEWYFFSHRDRKYPNGSRPNRAAGTGYWKATGADKPIGKPKTLGIKKALVFYAGKAPRGVKTNWIMHEYRLANVDRSASSNKKNNLRLDDWVLCRIYNKKGTVEKYYPADEKERVMMMTTNTTTTSDSKCSSHVISPDVTCSSEVQSESKWVVDLDDAFDASMFGSLLQNDAFVPQFPYQSDFASMFEDPLEQKPFFNWSFGSQG

SEQ ID NO: 107 - protein, 205 aa, Physcomitrella patens
MSSPSGGPVAQLQLPPGFRFHPTDEELVLHYLCRKAESKVFAIPVIAEIDLYKFDPWDLPGKAIFGEREWYFFSPRDRKYPNGARPNRAAASGYWKATGTDKPIHTAVGGIRKIGVKKALVFYEGRAPKGVKTNWIMHEYRLAEGVCASVHAHRKGSLRLDDWVLCRIYKKSTNAQRTGKERDSSSCVEEVTSHLDCMPDLTSFE

SEQ ID NO: 108 - protein, 250 aa, Arabidopsis lyrata
MMKSGADLQFPPGFRFHPTDEELVLMYLCRKCASQPIPAPIITELDLYRYDPWDLPDMALYGEKEWYFFSPRDRKYPNGSRPNRAAGTGYWKATGADKPIGRPKPVGIKKALVFYSGKPPNGEKTNWIMHEYRLADVDRSVRKKNSLRLDDWVLCRIYNKKGVIEKQRSENELRAVNDTCPPESVERLIAGSEQVVSQEFTCSNGRLSNALDFPFNYVDAIADNEIVSRLLSGNQMWSTLDPLVVRQRTF

SEQ ID NO: 109 - protein, 299 aa, Glycine max
MASELELPPGFRFHPTDEELVLHYLCRKCASQPIAVPIIAEIDLYKYDPWDLPGLATYGEKEWYFFSPRDRKYPNGSRPNRAAGTGYWKATGADKPIGQPKPVGIKKALVFYAGKAPKGDKSNWIMHEYRLADVDRSVRKKNTLRLDDWVLCRIYNKKGTIEKLQPSSDVAHSRNIESSEIEDRKPEILKSGGGCLPPPAPVPAPPQATAKTDYMYFDPSDSIPKLHTDSSCSEQVVSPGFASEVQSEPKWNEWEKSLEFPFNYVDATLNNSFMAQFQGNNQMLSPLQDMFMYWPNKSF

SEQ ID NO: 110 - protein, 333 aa, Vitis vinifera
  misc_feature (121)..(121): Xaa can be any naturally occurring amino acid
MGVPETDPLSQLSLPPGFRFYPTDEELLVQYLCRKVAGQGFSLEIIGEIDLYKFDPWVLPSKAIFGEKEWYFFSPRDRKYPNGSRPNRVAGSGYWKATGTDKVITTEGRKVGIKKALVFYXGKAPKGTKTNWIMHEYRLLENSRKNGSSKLDDWVLCRIYKKNSNSSKPIAAVLPSKAHSNGSSSSSSSHLDDVLESLPEIDDRFFSPNRMNSLRVSQPDEKVNFHNLGSGNFDWATLAGVSSLQELVSGVQSHAQPPAAVNNSNEMYVPSLPPLIQAEEEVQSGLRTQRVDPVMNQGFFPQNSNAFSQSFSNSLDPFGFRYPTQPSGFGYRQ

SEQ ID NO: 111 - protein, 181 aa, Selaginella moellendorffii
MEHNSKKAVNSLQLPPGFRFHPTDEELVVHYLARRAASRPFAVPIIAEVDLYKFDPWDLPDKALFGEREWYFFSPRDRKYPNGARPNRAAGSGYWKATGTDKPISSDGCKVGVKKALVFYRGRAPKGLKTSWIMHEYRLADASGASNRLSLRKKGSLRLDDWVLCRIYKKQSSDWKSPAAS

SEQ ID NO: 112 - DNA, 837 bp, Panicum virgatum
attccaacagcttcttcccctcaaagaccactccggcgagattcttcccagaccggccggcgaatcacagctcgatcgatcgttctccggcgagctagcaaccactccctgatcggaatggacttcggaggggcgctgcagctgccgccggggttccggttccacccgacggacgaggagctggtgacgcactacctcctgcgcaagtgcggcgggctggcaccggcggcgccggtgatcgcggaggtggacctgtacaagttcgacccgtggagcctgccggagcgggcggccggcggggagaaggagtggtacttcttctcgccgcgggaccgcaagtaccccaacgggtcgcgccccaaccgcgccgccggcgccgggtactggaaggccaccggcgccgacaagcccgtgggcgcgccgcgccccgtcgccatcaagaaggcgctcgtcttctacgccggcaagccgcccaggggcgtcaagaccaactggatcatgcacgagtaccgcctcgccgacgtcgaccgctccgccgccgcccgcaagaagacggccaataacaacgcgctcaggctggatgactgggtgctgtgccggatctacaacaagaagggcgtgatcgagcggtacgacacggtggacgacgacgaggtcgcggcggccaacgacgtcaagccggccgcgcccaagaacccgcgcggggcggccggcgccggcggcggccgcgcgccgatgaaggtggagatggccgactacggcgggtactacgacgacgggtacgacctcgagacgccgtccgcggggatgctgtgcttcgaccgcccggcggccgtg

SEQ ID NO: 113 - protein, 240 aa, Panicum virgatum
MDFGGALQLPPGFRFHPTDEELVTHYLLRKCGGLAPAAPVIAEVDLYKFDPWSLPERAAGGEKEWYFFSPRDRKYPNGSRPNRAAGAGYWKATGADKPVGAPRPVAIKKALVFYAGKPPRGVKTNWIMHEYRLADVDRSAAARKKTANNNALRLDDWVLCRIYNKKGVIERYDTVDDDEVAAANDVKPAAPKNPRGAAGAGGGRAPMKVEMADYGGYYDDGYDLETPSAGMLCFDRPAAV

SEQ ID NO: 114 - DNA, 1395 bp, Glycine max
aagtttgaagcggcgccaccatagttggtgtagctagcgagggagggatatagggggaagcgtttattcattcattaagatggcatcggagcttcaattgcccccaggcttcagattccatccaacggaccaggagctggtgttgcactatctctgccgtaaatgcgcatcgcagcctatcgccgttcccatcatcgccgaaatcgacctctacaaatacgacccctgggacctacccggattggcttcctacggagagaaagagtggtacttcttttcaccacgggaccggaaatacccgaacggttccaggccgaaccgggcggcgggaaccggttactggaaggcaaccggggcggataagcccattggccaccccaaaccggttgggataaaaaaagctttggtgttttacgcagggaaagctccgaaaggggacaagagcaattggatcatgcacgagtatcgtctcgccgatgtagatcgctccgttcgcaaaaagaacagcctaaggttagatgattgggtgctttgccgtatttacaacaagaagggcacgatcgagaagttccaaccaagcagcgatgttgttgttagccgaaaaatggaatcatcggagatcgaagacaggaagccggagattctgaaaagcggaggaggttgtcttctgccgccggttccgccgccgcaagcgaaggcggcggtgaagaaggattacatgtacttcgacccgtcggattcaatcccgaagctgcacacggactcgagctgttcggagcacgtggtatcgccggaattcgcgagcgaggtgcagagcgagccaaagtggaaggagtgggagaaaagcctcgagtttccgtttaattacgtggatgccactctgaacaacagcaacagcttcacgacgcaattccagggcaataatcagatgatgtcgccgctgcaggacatgttcatgtactggcccaacaagcccttctgaacaaaccgatccacgccgcccattcgcatttgcacggtagcacgagactcaaggtctatgagtgtgcctgtgcgaccacacacagacgattatttatcaagttagcttagctagggcaaagaaagataaaaacattgaagctggaaacgcatgtgtttgttgggtccaccgtctgcaccggttctttttggtgttttgctatgtgacgacgacgacgacgatgacgatccaacggtgcatgtttgttgacctgtccctagtagtagtagcatgtgtacagctattgtatgtagaatgtagataggtacactactacacgttgttgtcatgtgatcatagaagctctcttaccgggaaaaataaaaattgatagaaggatggaaggtgtatttggaccttccctaattaatatt

SEQ ID NO: 115 - protein, 300 aa, Glycine max
MASELQLPPGFRFHPTDQELVLHYLCRKCASQPIAVPIIAEIDLYKYDPWDLPGLASYGEKEWYFFSPRDRKYPNGSRPNRAAGTGYWKATGADKPIGHPKPVGIKKALVFYAGKAPKGDKSNWIMHEYRLADVDRSVRKKNSLRLDDWVLCRIYNKKGTIEKFQPSSDVVVSRKMESSEIEDRKPEILKSGGGCLLPPVPPPQAKAAVKKDYMYFDPSDSIPKLHTDSSCSEHVVSPEFASEVQSEPKWKEWEKSLEFPFNYVDATLNNSNSFTTQFQGNNQMMSPLQDMFMYWPNKPF

SEQ ID NO: 116 - DNA, 698 bp, Panicum virgatum
gtcgccacggaaacagctcacgggcagcgaggatttatctcccggctgccagccagccgccgttcgaaaccggacacacgaggaggggggagacgcggtctcgtctggagcctgggatcgagagcgcccgatccatcatccatccatcaggctgtttgggggattgattgctcgagttcgagtaggagcaggaggaggaagatggcaatggtgttggcggcggcggcggtggggagcgggcgcagggacgcggaggcggagctcaacctgccgccggggttccggttccaccccaccgacgaggagctcgtggtgcactacctctgccggaaggtggcgcggcagcagctgcccgtgcccatcatcgccgaggtcgacctctacaagttcgatccctgggatctcccagagaaggcgctgttcggccgcaaggagtggtacttcttcacgccgcggggccgcaagtaccccaacggctcgcgccccaaccgcgccgccgggagggggtactggaaggccaccggcgccgacaagcccatcacgcccaagggctgcgccagggcggcgggcatcaagaaggcgctggtgttctactccggcaaggcgccccggggcgtcaagaccgactggatcatgcacgagtaccgcctcgccgacgcggaccgcgccccgggcaagaaggggtcccagaagttgga

SEQ ID NO: 117 - protein, 165 aa, Panicum virgatum
MAMVLAAAAVGSGRRDAEAELNLPPGFRFHPTDEELVVHYLCRKVARQQLPVPIIAEVDLYKFDPWDLPEKALFGRKEWYFFTPRGRKYPNGSRPNRAAGRGYWKATGADKPITPKGCARAAGIKKALVFYSGKAPRGVKTDWIMHEYRLADADRAPGKKGSQKL

SEQ ID NO: 118 - DNA, 876 bp, Sorghum bicolor
atgagcggcggcggtcaggatctgcagctgccgccggggttccggttccacccgacggacgaggagctggtgatgcactacctctgccgccgctgcgccggcctgcccatcgccgtccccatcatcgccgagatcgacctctacaagttcgacccatggcagctccccaggatggcgctgtacggcgagaaggagtggtacttcttctccccgcgggaccgcaagtacccgaacgggtcgaggccgaaccgcgccgccgggtccggctactggaaggccaccggcgccgacaagcccgtgggcacgcccaagccgctcgccatcaagaaggcgctcgtcttctacgccggcaaggcgcccaagggcgagaagaccaactggatcatgcacgagtaccgcctcgccgacgtcgaccgctccgcccgcaagaagaacagcctcaggttggatgactgggtcctgtgccgcatctacaacaagaagggcgggctggagaagccgtcggcggtcgccggcggcgaccacaagccgatgttcgcagcggccgcggtgagctccccaccggagcagaagccgttcgtggcggcgccgggcgggcttcccccattcccggacctggcggcgtactacgaccggccgtcggactcgatgccgcggctgcacgcggactccagctgctcggagcaggtgctgtcgccggagcagctggcgtgcgaccgggaggtgcagagccagcccaagatcagcgagtgggagcgcaccttcgcctccgaccccgtcaaccccgccggctccatgctcgaccccgtcgtcggtggccacgccggcgacccgctgctgcaggacatcctcatgtactggggcaagccgttctag

SEQ ID NO: 119 - protein, 291 aa, Sorghum bicolor
MSGGGQDLQLPPGFRFHPTDEELVMHYLCRRCAGLPIAVPIIAEIDLYKFDPWQLPRMALYGEKEWYFFSPRDRKYPNGSRPNRAAGSGYWKATGADKPVGTPKPLAIKKALVFYAGKAPKGEKTNWIMHEYRLADVDRSARKKNSLRLDDWVLCRIYNKKGGLEKPSAVAGGDHKPMFAAAAVSSPPEQKPFVAAPGGLPPFPDLAAYYDRPSDSMPRLHADSSCSEQVLSPEQLACDREVQSQPKISEWERTFASDPVNPAGSMLDPVVGGHAGDPLLQDILMYWGKPF

SEQ ID NO: 120 - protein, 278 aa, Brassica napus
MKAGLNLPAGFRFHPTDEELVQFYLCRKCASEEISAPVIAEIDLYKFNPWELPEMSLYGEKEWYFFSPRDRKYPNGSRPNRAAGTGYWKATGADKPIGKPKTLGIKKALVFYAGKAPKGIKTNWIMHEYRLANVDRSASVNKKNNLRLDDWVLCRIYNKKGTMEKYYPADEKPMTVTAASSPFDASDSTYPTLQEDDSSSSGGRVVSPDAREVQSEPKWGEFENAFDASMFGGGSMDLLQSEDFVPQFLYQPSYDFNSWQEDPPEQKPFLNWSFAPQG

SEQ ID NO: 121 - protein, 174 aa, Glycine max
MASELQLPPGFRFHPTDQELVLHYLCRKCASQPIAVPIIAEIDLYKYDPWDLPGLASYGEKEWYFFSPRDRKYPNGSRPNRAAGTGYWKATGADKPIGHPKPVGIKKALVFYAGKAPKGDKSNWIMHEYRLADVDRSVRKKNSLRLDDWVLCRIYNKKGTIEKFQPSSDVVVSR

SEQ ID NO: 122 - protein, 253 aa, Arabidopsis thaliana
MMKSGADLQFPPGFRFHPTDEELVLMYLCRKCASQPIPAPIITELDLYRYDPWDLPDMALYGEKEWYFFSPRDRKYPNGSRPNRAAGTGYWKATGADKPIGRPKPVGIKKALVFYSGKPPNGEKTNWIMHEYRLADVDRSVRKKNSLRLDDWVLCRIYNKKGVIEKRRSDIEDGLKPVTDTCPPESVARLISGSEQAVSPEFTCSNGRLSNALDFPFNYVDAIADNEIVSRLLGGNQMWSTTLDPLVVRQGTF

SEQ ID NO: 123 - DNA, 880 bp, Gossypium hirsutum
agaccacccggtaccaacagccaacaacacaaagaaggcatatttacagcttttttaaagaggagcttaagaaagttaagtctaaaaaggaagaagagtttaaagagttcagagaatgaagggagagttagagttgccacctggtttcagattccatcctacagatgacgaattggtgaatcattatttgtgtaggaaatgtgcttctcagcctatttctgtgcccatcattgctgagattgatctttacaagtttgatccatggcagcttccagatatggcgttgtatggtgaaaaagagtggtatttcttttctccaagggatcgaaaatacccaaatgggtgtcggccgaacagggcggctggaaccggatattggaaagcgaccggagccgataagcctatcggaaagcccaaggcactgggcataaaaaaagcactcgttttctacgctggtaaagccccacgcggtgtcaaaaccaactggattatgcacgagtatcgcctcgccaatgttgataggtccgccggcaagagaagcaacaacttgaggcttgatgattgggtgttatgtcgaatatacaacaagaaaggaagcatagagaaacattttccgagtgaacaaaaatcgttaagttacccagaaatggaagatgagaaactgggcatcataatgaatggtcaaaacatgcaacaaccgtggtcggtgatggcgatgaagaacgatgcaatacaaacggatggttcggagtcgagttggtcggagcacgtgccgtcaccggaaatcacgtgggagaaagaagtgaaaagtgaagggagatggaatgagcttgatttcgggttggatttcatagatgaagacccgtttgccagtcaagtt

SEQ ID NO: 124 - protein, 255 aa, Gossypium hirsutum
MKGELELPPGFRFHPTDDELVNHYLCRKCASQPISVPIIAEIDLYKFDPWQLPDMALYGEKEWYFFSPRDRKYPNGCRPNRAAGTGYWKATGADKPIGKPKALGIKKALVFYAGKAPRGVKTNWIMHEYRLANVDRSAGKRSNNLRLDDWVLCRIYNKKGSIEKHFPSEQKSLSYPEMEDEKLGIIMNGQNMQQPWSVMAMKNDAIQTDGSESSWSEHVPSPEITWEKEVKSEGRWNELDFGLDFIDEDPFASQV

SEQ ID NO: 125 - protein, 305 aa, Citrus sinensis
MMKGAELELPPGFRFHPTDEELVNHYLCRKCAGLPISVPIIAEIDLYKYDPWELPEMARYGEKEWYFFSPRDRKYPNGSRPNRAAGSGYWKATGADKPIGKPKTLGIKKALVFYAGKAPKGIKTNWIMHEYRPANVHRSPATKNNLRLDDWVLCRLYDKKGRMEKHYPSDQKSIGFPELEEDRKPNINISRQEVALGMPPHQGSPAPMMNDLLHMDTSDSVPRLQTDSSCSEHVLSPEITCDKEVQSMPKWNDLGNALNDDYNQFNFNYMDTNSFQDDPFGPQVQYQMDQLSPYQDLFMILQKPF

SEQ ID NO: 126 - protein, 333 aa, Vitis vinifera
MGVPETDPLSQLSLPPGFRFYPTDEELLVQYLCRKVAGQGFSLEIIGEIDLYKFDPWVLPSKAIFGEKEWYFFSPRDRKYPNGSRPNRVAGSGYWKATGTDKVITTEGRKVGIKKALVFYVGKAPKGTKTNWIMHEYRLLENSRKNGSSKLDDWVLCRIYKKNSNSSKPIAAVLPSKAHSNGSSSSSSSHLDDVLESLPEIDDRFFSPNRMNSLRVSQPDEKVNFHNLGSGNFDWATLAGVSSLQELVSGVQSHAQPPAAVNNSNEMYVPSLPPLIQAEEEVQSGLRTQRVDPVMNQGFFPQNSNAFSQSFSNSLDPFGFRYPTQPSGFGYRQ

SEQ ID NO: 127 - protein, 349 aa, Ricinus communis
MPKRHEPTLEWGQGSDGSNDRNYHTSSSELKAATGKREENKQKREKEVEMKGAELDLPAGFRFHPTDDELVNHYLCRKCAGQSISVPIIAEIDLYKHDPWQLPEMALYGEKEWYFFSPRDRKYPNGSRPNRAAGSGYWKATGADKPIGKPKPLGIKKALVFYAGKAPKGIKTNWIMHEYRLANVDRSAGKKTNLRLDDWVLCRVYNKKGSMEKHQPVSDRKLLKYPEAEEDQKPDILIYGDKAISTFGPSIMNDSSNNDLLAHMDTTSDSVPRLHTDSSCSEEHVLSPEKEVQSEPNWNALDSNALDFGFNYLVDGGFQDYDPFASQVQFQMDQLSPLQDMFMFLQKPF

SEQ ID NO: 128 - DNA, 712 bp, Panicum virgatum
attccaacagcttcttccccccaaagaccactccggcgagcttcttcccagaccggccggcgaatcacagctcgatcgatcgttctccggcgagccagcaaccactccctgatcggaattcggaatggacttcggaggggcgctgcagctgccgccggggttccggttccacccgacggacgaggagctggtgacgcactacctcctgcgcaagtgcggcgggctggcgccggcggcgccggtgatcgcggaggtggacctgtacaagttcgacccgtggagcctgccggagcgggcggcgggcggggagaaggagtggtacttcttctcgccgcgggaccgcaagtaccccaacgggtcgcgccccaaccgcgccgccggcgccgggtactggaaggccaccggcgccgacaagcccgtgggcgcgccgcgccccgtcgccatcaagaaggcgctcgtcttctacgccggcaagccgcccaggggcgtcaagaccaactggatcatgcacgagtaccgcctcgccgacgtcgaccgctccgccgccgcccgcaagaagacggccaataacaacaacgcgctcaggctggatgactgggtgctgtgccggatctacaacaagaaaggcgtgatcgagcggtacgacacggtggacgacgacgaggtcgcggcggccaacgacgtcaagccggccgcgcccaagaacccgcgc

SEQ ID NO: 129 - protein, 196 aa, Panicum virgatum
MDFGGALQLPPGFRFHPTDEELVTHYLLRKCGGLAPAAPVIAEVDLYKFDPWSLPERAAGGEKEWYFFSPRDRKYPNGSRPNRAAGAGYWKATGADKPVGAPRPVAIKKALVFYAGKPPRGVKTNWIMHEYRLADVDRSAAARKKTANNNNALRLDDWVLCRIYNKKGVIERYDTVDDDEVAAANDVKPAAPKNPR

SEQ ID NO: 130 - protein, 1234 aa, Gossypium hirsutum
AAAGTTTCAAGCGCCGTCGCCACATAAAAGATAGGAGAGAGGAGAGGAAAAAAAAAAGGGGTCAGGTATACCTGAAAGGTTAAAAACGTCAGAAAAAAAAATGACTGCAACGGAGTTACAGTTACGGTTACCCGCTGGCTTTCGGTTCCATCCAACGGATGAGGAACTGGTGATGCACTATCTCTGCCGTAAATGTGCGTCTCAGTCTATCGCCGTCCCTATTATCGCCGAACTCGATCTTTACAAATACGATCCTTGGGATCTTCCTGATTTGGCGTTGTACGGTGAGAAAGAGTGGTATTTCTTTTCACCGAGAGACAGGAAATATCCGAACGGTTCAAGGCCGAACCGTGCGGCCGGGTCTGGGTACTGGAAGGCAACCGGAGCTGATAAGCCGATTGGGCAACCGAAACCGGTCGGTATTAAAAAGGCTTTGGTGTTTTACTCCGGGAAAGCTCCGAAAGGAGAGAAAACTAATTGGATTATGCATGAGTATCGATTAGCCGACGTGGACCGGTCGGTTCGCAAGAAGAACAGCCTAAGGTTGGACGATTGGGTGCTGTGCCGGATTTACAATAAGAAAGGTTGCATCGAAAAACAACCTCCGCGAGGAAGCGTTACGAAAAAAGCTAGCGTGACGGAGATTGAGGAGAGTAAGCCGGATAATGGGACACTAGGCGTGGAGGCGTGTGAATTTCCGCCGGCAGCGACGGCGGTGGGTAACGATTACGTATATTTCGACTCGTCGGAGTCGGTCCCGAGGGTTCACACGGACTCGAGCTGTTCGGAACATGCGGTGTCTCGGGAATTCATGACTGAGGTTCAAAGCGTTCCCAAATGGAAGGAAGAATTGGGAATGGCCAACAATAATGCCCTGGATTTCGCTTATAATTACTTGGATACCAATATGGATATCGGATTTGCTTCACAGATGCAGAGTAGTAATCAGCTGTCGCCATACCAGGATATATTTATGTACCTGCAGAAGCCATTTTAGAGGAGAAAATAAATTTGGGCGTTGCAATTGAAGGGATACTGTGTTTTGGCGTATCGCTGGGTAACACGAGACTGAAAGTCCATGAGTGTACCGGTGGGCGTGCGCGTAGATAAAAAGAAGCTGCTTAAACTTTGAAATTGGTAGATAGAACGGGAAAGCCGGGGGGAGGTTGTTGATTATTTGTTTATATAAAATCAGAGAGCTAAAATTTGATGATTAAAATATATTTTAGATTTT

SEQ ID NO: 131 - protein, 298 aa, Gossypium hirsutum
MTATELQLRLPAGFRFHPTDEELVMHYLCRKCASQSIAVPIIAELDLYKYDPWDLPDLALYGEKEWYFFSPRDRKYPNGSRPNRAAGSGYWKATGADKPIGQPKPVGIKKALVFYSGKAPKGEKTNWIMHEYRLADVDRSVRKKNSLRLDDWVLCRIYNKKGCIEKQPPRGSVTKKASVTEIEESKPDNGTLGVEACEFPPAATAVGNDYVYFDSSESVPRVHTDSSCSEHAVSREFMTEVQSVPKWKEELGMANNNALDFAYNYLDTNMDIGFASQMQSSNQLSPYQDIFMYLQKPF

SEQ ID NO: 132 - protein, 260 aa, Arachis hypogaea
MKSELELPPGFRFHPTDEELVNHYLCKKCASQSIAVPIIKEIDLYKFDPWHLPEMALYGEKEWYFFSPRDRKYPNGSRPNRAAGSGYWKATGADKPIGKPKALAIKKALVFYAGKAPKGVKTNWIMHEYRLANVDRSAGNKKNNLRLDDWVLCRIYNKKGKIEKYNHLGAADHKSASSEEENERKPEVKERLHMDTSSDSVVSADVTWESREVQSEPKWNDLLDQVFDFQLGSFVDFSSAGDDPFAPQLSPWHQDTFITF

SEQ ID NO: 133 - DNA, 2058 bp, Populus trichocarpa
atgggactgcaagaaacagaccctctagcccaattgagcttgccaccgggatttcggtttcacccgactgatgaagagcttttggtgcaatacttgtgtaagaaggttgctggtcaccatttctccttgcaaatcattggcgaaattgatttgtacaagtttgatccgtggttcttaccaggtaaggcaatatttggtgaaaaagaatggtattttttcagtccgagagaccgcaagtaccccaatggatcccgacccaacagggttgccgggtctgggtattggaaggccaccggtactgacaaagtaatcacgacagagggacgtaaagttggcatcaagaaagctttggtcttttacgttggcaaagccccaaaaggcaccaaaactaattggatcatgcatgaatatcgccttcttgaatcctctcgcaaaagtggaagtacaaagttggatgaatgggtattgtgtcggatttacaagaagaattcaagtgctgcacagaaatccatgtcaagcgtttcaagcaaagaatacagtactaatggttcatgttcatcatcctcttctcatttggaagatgtccttgactcattgacagagattgatgaccggctctttgctttgcctcgaaccaactcactcaaacaaatgcaacacgaagagaaaatcaacttagcaaatctgggttcagggagctttgactgggcgacacttgctgggctcaactcgttgcctgaactcctacaaactcagcctggtgcgaattactcgaataccaatgtcaatggtgtgcatgtcccttcaatgcccccactctgccacgcggattcatcaacagggaggatggggacctcggttgaagaggaggtccaaagtggggttagaactcagctgcgagatggcaactcgggggcttttcaacaaaactcgggcgtgatgacaccgaacttctcttctaccttactcgacccatatgagctaaggtattcgacccaaccgggaagtgggtatgggtttaggcagtgaatgggactgcaagaaacagaccctctagcccaattgagcttgccaccgggatttcggtttcacccgactgatgaagagcttttggtgcaatacttgtgtaagaaggttgctggtcaccatttctccttgcaaatcattggcgaaattgatttgtacaagtttgatccgtggttcttaccaggtaaggcaatatttggtgaaaaagaatggtattttttcagtccgagagaccgcaagtaccccaatggatcccgacccaacagggttgccgggtctgggtattggaaggccaccggtactgacaaagtaatcacgacagagggacgtaaagttggcatcaagaaagctttggtcttttacgttggcaaagccccaaaaggcaccaaaactaattggatcatgcatgaatatcgccttcttgaatcctctcgcaaaagtggaagtacaaagttggatgaatgggtattgtgtcggatttacaagaagaattcaagtgctgcacagaaatccatgtcaagcgtttcaagcaaagaatacagtactaatggttcatgttcatcatcctcttctcatttggaagatgtccttgactcattgacagagattgatgaccggctctttgctttgcctcgaaccaactcactcaaacaaatgcaacacgaagagaaaatcaacttagcaaatctgggttcagggagctttgactgggcgacacttgctgggctcaactcgttgcctgaactcctacaaactcagcctggtgcgaattactcgaataccaatgtcaatggtgtgcatgtcccttcaatgcccccactctgccacgcggattcatcaacagggaggatggggacctcggttgaagaggaggtccaaagtggggttagaactcagctgcgagatggcaactcgggggcttttcaacaaaactcgggcgtgatgacaccgaacttctcttctaccttactcgacccatatgagctaaggtattcgacccaaccgggaagtgggtatgggtttaggcagtga

SEQ ID NO: 134 - protein, 342 aa, Populus trichocarpa
MGLQETDPLAQLSLPPGFRFHPTDEELLVQYLCKKVAGHHFSLQIIGEIDLYKFDPWFLPGKAIFGEKEWYFFSPRDRKYPNGSRPNRVAGSGYWKATGTDKVITTEGRKVGIKKALVFYVGKAPKGTKTNWIMHEYRLLESSRKSGSTKLDEWVLCRIYKKNSSAAQKSMSSVSSKEYSTNGSCSSSSSHLEDVLDSLTEIDDRLFALPRTNSLKQMQHEEKINLANLGSGSFDWATLAGLNSLPELLQTQPGANYSNTNVNGVHVPSMPPLCHADSSTGRMGTSVEEEVQSGVRTQLRDGNSGAFQQNSGVMTPNFSSTLLDPYELRYSTQPGSGYGFRQ

SEQ ID NO: 135 - DNA, 1168 bp, Arabidopsis thaliana
agattacaatcttgagcagacgaagaaaacccaaaaaaaatccagatccagctgaaattgaattttcaaccaacgaagaagagatttttccaagagcaacagacaagaagaagagaatgaagtcggagctaaatttaccagctgggttccgattccatccaacggacgaggagcttgtgaaattctacttgtgccggaaatgtgcttccgagcagatctcggctccggttatcgccgagattgatctctacaagttcaatccttgggagcttccagagatgtctctgtacggagagaaagagtggtacttcttctcacctagagatcggaaatacccaaacggttcgcgtcctaaccgggcagcaggaaccggttattggaaagctaccggagcagataaaccgattggtaaaccgaagacgttgggtatcaagaaagcactcgtcttctacgcagggaaagctccaaaagggattaagaccaattggataatgcatgagtatcgtctcgctaatgttgatagatcagcttctgttaacaaaaagaacaacctacgacttgatgattgggttttatgtcgaatatacaacaagaaaggaaccatggagaagtatttccccgcggatgagaagccgaggaccacgacaatggctgaacagtcatcatcaccttttgatacatcagactcgacttacccgacattgcaagaggatgattccagcagctcaggtggtcacggtcacgtggtgtcaccggatgttttggaggttcagagcgagcctaaatggggagagcttgaggatgctttggaagcttttgatacttcaatgtttggtagttccatggagttgttgcagcctgacgcttttgtccctcagttcttgtatcagtctgattatttcacttccttccaggatccgcctgagcagaaaccattcttgaattggagttttgctccacaggggtaaaaacggaagagaccaaaaaaggtgtttgctagtagtactgtgatgtgccagagagaagagtctcatctcaactcatccctggctcttagtagtaaaagaagattgtagaatgttaatagcttttagcatcaatgtctcattagcaggcacattcttgttctttcatgagaagtttatatgaaaactaaaaatttatattc

SEQ ID NO: 136 - protein, 283 aa, Arabidopsis thaliana
MKSELNLPAGFRFHPTDEELVKFYLCRKCASEQISAPVIAEIDLYKFNPWELPEMSLYGEKEWYFFSPRDRKYPNGSRPNRAAGTGYWKATGADKPIGKPKTLGIKKALVFYAGKAPKGIKTNWIMHEYRLANVDRSASVNKKNNLRLDDWVLCRIYNKKGTMEKYFPADEKPRTTTMAEQSSSPFDTSDSTYPTLQEDDSSSSGGHGHVVSPDVLEVQSEPKWGELEDALEAFDTSMFGSSMELLQPDAFVPQFLYQSDYFTSFQDPPEQKPFLNWSFAPQG

SEQ ID NO: 137 - protein, 349 aa, Arachis hypogaea
MGIQEKDPLSQLSLPPGFRFYPTDEELLVQYLCRKVAGHHFSLEIIGEIDLYKFDPWVLPSKAIFGEKEWYFFSPRDRKYPNGSRPNRVAGSGYWKATGTDKTITTEGRKVGIKEALVFYIGKAPKGTKTNWIMHEYRLLDSTRKNGSTKLDDWVLCRIYKKNSSAQQKVPNGVVSSSEQYATQYSNGSSSNSSSSHLDEVLESLPEIDDRCFALPRVNSLRALQQQRHHQEDTKVGLLQQQQQQGLVAGTGSFLDWASGPGILNDLGQAQQGIVNYGNDLFVPSVCHVDSNLVPAKIEEEVQSGVKTQSAFFQQGPNPNDFTQAFSNQLDPYGFSRYSVQPVGFGFRQ

SEQ ID NO: 138 - protein, 304 aa, Hordeum vulgare
MSGGQELNLPPGFRFHPTDEELVMHYLCRRCAGAPIAVPIITEIDLYKLDPWQLPKMAMYGEKEWYFFSPRDRKYPNGSRPNRAAGSGYWKATGADKPVGTPKPLAIKKALVFYAGKAPKGEKTNWIMHEYRLADVDRSARKKNSLRLDDWVLCRIYNKKGGMEKPASVDRKPVTMGGYGVGPGAMASSPQEQKPVMGMNANGGGSGGVQPFPDFAAYYDRPSDSMPRLHADSRCSEQVLSPDFPGERGGGEVQSQPKISELERSFASGGDPVNPAAGSILEPHGGFGGDPLLQDILMYWGKPF

SEQ ID NO: 139 - DNA, 585 bp, Brassica napus
gattacaatcgccgattaaaaaccaacaaaatgaaggcggagctaaatttaccggcgggattccgatttcacccgacggacgaggagctagtgaagttctatctctgccggagatgcgcgtcggagccgatcaccgttccggtgatcgcggagattgatctgtacaagttcaatccatgggagcttccagacaaggcgttgtacggagagaaagaatggtacttcttctcacaccgagaccggaaatacccaaacggttcgcgtccaaaccgggcagctggaaccggttattggaaagcgactggagctgataaaccgatcggtaaaccgaagacgttggggattaagaaagcgctcgtcttctacgcagggaaagctccgagaggagtgaagacgaattggattatgcacgagtatcgtctcgctaatgttgaccggtccgcttcttcgaacaagaagaacaacttaagacttgatgattgggtgttatgtcggatttacaataagaaaggaacggtggagaagtattatccggcggatgagaaagagagggtgatgatgatgactactaatactactacgacg

SEQ ID NO: 140 - protein, 185 aa, Brassica napus
MKAELNLPAGFRFHPTDEELVKFYLCRRCASEPITVPVIAEIDLYKFNPWELPDKALYGEKEWYFFSHRDRKYPNGSRPNRAAGTGYWKATGADKPIGKPKTLGIKKALVFYAGKAPRGVKTNWIMHEYRLANVDRSASSNKKNNLRLDDWVLCRIYNKKGTVEKYYPADEKERVMMMTTNTTTT

SEQ ID NO: 141 - DNA, 1042 bp, Arabidopsis thaliana
aaaacatatctttacagttctttcttgctaaacaacaataaaggggaaaataggttaattatgatgaaatctggggctgatttgcaatttccaccaggatttagatttcatcctacggatgaggagctagtcctcatgtatctctgtcgtaattgcgcgtcgcagccgatccctgctccgattatcaccgaactcgatttgtaccgatatgatccttgggaccttcccgacatggctttgtacggtgaaaaggagtggtattttttctcaccaagagatcgaaagtatccaaacggttcaagacccaaccgtgcagctggtactggatattggaaagctaccggagctgataaaccaataggtcgtcctaaaccggttggtattaagaaggctctagtgttttactcgggaaaacctccaaatggagagaaaaccaattggattatgcacgaataccggctcgctgacgttgaccggtcggttcttaagaaaaacagtctaagattggacgattgggtattgtgtcgtatatataacaagaaaggtgtcatcgagaagcgacgaagcgatatcgaggacgggttaaagcctgtgactgacacgtgtccaccggaatctgtggcgagattgatctccggctcggagcaagcggtgtcaccggaattcacgtgtagcaacggtcggttgagtaatgcccttgattttccgtttaattacgtagatgccatcgccgataacgagattgtgtcacggctattgggcgggaatcagatgtggtcgacgacgcttgatccacttgtggttaggcagggaactttctgagttgtcacgtgcgattagagttagtggaaagtggaaactatcactgtctgttttcgcacgtgtcgggtagccgtcttgaaacccgctagctggtccagaagtgacctcattgggcttttcaacaacaattgggccttagcctttcttctcccttagtaagacaagctactgtattgtgttgttattttcaggaagcaatataaattcattttaatcactc

SEQ ID NO: 142 - protein, 253 aa, Arabidopsis thaliana
MMKSGADLQFPPGFRFHPTDEELVLMYLCRNCASQPIPAPIITELDLYRYDPWDLPDMALYGEKEWYFFSPRDRKYPNGSRPNRAAGTGYWKATGADKPIGRPKPVGIKKALVFYSGKPPNGEKTNWIMHEYRLADVDRSVLKKNSLRLDDWVLCRIYNKKGVIEKRRSDIEDGLKPVTDTCPPESVARLISGSEQAVSPEFTCSNGRLSNALDFPFNYVDAIADNEIVSRLLGGNQMWSTTLDPLVVRQGTF

SEQ ID NO: 143 - DNA, 746 bp, Panicum virgatum
aagccctcctcccctcttcctaccattagcagaagagaagaagagcagagacaggcaggctgcaaagcagcagcagcgaagcgcgatcgagagagagacacgatgagcggcggcggccaggacctgcatctgccgccggggttccggttccacccgacggacgaggagctggtgatgcactacctctgccgccgctgcgccgggctgcccatcgccgtccccatcgtcgccgagatcgacctctacaagttcgacccatggcagctccccagaatggcgctgtacggcgagaaggagtggtacttcttctccccgcgggaccgcaagtacccgaacgggtcgcggccgaaccgcgccgccgggtccgggtactggaaggccaccggcgccgacaagcccgtgggcacgcccaagcccctcgccatcaagaaggcgctagtcttctacgccggcaaggcgcccaagggcgagaagaccaactggatcatgcacgagtaccgcctcgccgacgtcgaccgcaccgcccgcaagaagaacagcctcaggctggatgactgggtcctgtgccgcatctacaacaagaagggcgggctggagaagccgccagtggccgccggcgaccgcaagccggcgctcgccgcggcggcgggctccccgccggagcagaagccgttcgtggcggcgccgggcgggctccccccccgcgtcgcggacctggcggcgtactacgaccggccgtcggactc

SEQ ID NO: 144 - protein, 214 aa, Panicum virgatum
MSGGGQDLHLPPGFRFHPTDEELVMHYLCRRCAGLPIAVPIVAEIDLYKFDPWQLPRMALYGEKEWYFFSPRDRKYPNGSRPNRAAGSGYWKATGADKPVGTPKPLAIKKALVFYAGKAPKGEKTNWIMHEYRLADVDRTARKKNSLRLDDWVLCRIYNKKGGLEKPPVAAGDRKPALAAAAGSPPEQKPFVAAPGGLPPRVADLAAYYDRPSD

SEQ ID NO: 145 - DNA, 840 bp, Panicum virgatum
atgacagcggcgacactagagttaccaccaggtttcaggttccatccaacggatgaggagctcgtgctgcactatctctgccgtaaatgctcatcgcagcccattgctgttcctattattgctgaagttgatctctacaagtttgacccatgggatctccctggtatggccttgtacggagaaaaggaatggtacttttttacgccgagggacaggaagtaccctaacggatcgagaccgaatcgtgctgcagggaggggctactggaaagccacgggagccgacaagccgatcgggcagccaaagacagctgggatcaagaaagctttggtattttacgcaggaaaagctcccaagggagagaaaacgaactggattatgcacgagtatcgcctagccgaggtggatcgctccgttcgcaagaagaacagcttaaggctggacgattgggtactctgtcgcatacacaacaagaaaggcacaattgagaagcaagggcagcatcttagcgtccagaaagcgaattcgtcgacggagattgccgaggaggatgagaagaagtcggtggttatgctgccgccaccaccaggcccgtcctcggcgacaggaacggtgaatgattacgtctatttcgacacgtcagattctgtgccgaggctgcacacagattcgagctgctcggagcatgtggtgtcgccagaattcacgtgcgaggtgcagagcaatccttataattacttggatgccaccatggatattccgttcgcgtctcaatttcaggggaatcatcagatgtcgccgcttcaggacatgttcatgtatctgcagaagccgttttga

SEQ ID NO: 146 - protein, 279 aa, Panicum virgatum
MTAATLELPPGFRFHPTDEELVLHYLCRKCSSQPIAVPIIAEVDLYKFDPWDLPGMALYGEKEWYFFTPRDRKYPNGSRPNRAAGRGYWKATGADKPIGQPKTAGIKKALVFYAGKAPKGEKTNWIMHEYRLAEVDRSVRKKNSLRLDDWVLCRIHNKKGTIEKQGQHLSVQKANSSTEIAEEDEKKSVVMLPPPPGPSSATGTVNDYVYFDTSDSVPRLHTDSSCSEHVVSPEFTCEVQSNPYNYLDATMDIPFASQFQGNHQMSPLQDMFMYLQKPF

SEQ ID NO: 147 - protein, 297 aa, Panicum virgatum
MDSGGKPRTAPPSEQLNLPAGFRFHPTDEELVVSYLAIKAESRPFAIPIIAEIDLYKFDPWELPEKALFGEREWYFFSPRDRKYPNGARPNRAAASGYWKATGTDKPILSKGKKVGVKKALVFYKGKAPKGSKTNWIMHEYRLADSSAKAAAAIPAMRKKGSLRLDDWVLCRIYKKSSGAFKPMLSGSTTPRSSMKSEPPEEELDDVLASLPDIDDNSRLYKIPPFGSSSPPPPPRRGRAWNSRTRTTSGVRADRPSRGPSRDLPTICPPRCSTRDLLARRRPSHFLLGERSVENRC

SEQ ID NO: 148 - protein, 296 aa, Panicum virgatum
MKGAEIELPPGFRFHPTDEELVNHYLLRKCGGQPIAVPIIAEIDLYKFDPWQLPEKAVSGEKEWYFFSPRDRKYPNGSRPNRAAGTGYWKATGADKPIGRPKPLGIKKALVFYAGKAPRGIKTNWIMHEYRLANVDRSAGKTKNLRLDDWVLCRIYNKKGSIEKYSVDRKLNYSETEDQKPDISMASQNGMALPQRSPLAPSSMMSSDLLHVDTSDSIPRLHTDSSCSEHVLSPEVTCEKEVQSEPKWNADLENSFDFNLGYMDAFQDDPFASQVQYQMDYLSPSQEMFMYWQKPL

SEQ ID NO: 149 - protein, 283 aa, Arabidopsis lyrata
MKAELNLPAGFRFHPTDEELVKFYLCRKCASEQISAPVIAEIDLYKFNPWELPDMSLYGEKEWYFFSPRDRKYPNGSRPNRAAGTGYWKATGADKPIGKPKTLGIKKALVFYAGKAPKGIKTNWIMHEYRLANVDRSASVNKKNNLRLDDWVLCRIYNKKGTMEKYFPADEKPRTTTVAEQSSSPFDTSDSTYPTLQEDDSSSSGGHGHVVSPDVLEVQSEPKWGELEDALEAFDTSMFGGSMELLQPDAFVPQFLYQSDYFTSFQDPPEQKPFLNWSFAPQG

SEQ ID NO: 150 - protein, 252 aa, Arabidopsis thaliana
MKSGADLQFPPGFRFHPTDEELVLMYLCRNCASQPIPAPIITELDLYRYDPWDLPDMALYGEKEWYFFSPRDRKYPNGSRPNRAAGTGYWKATGADKPIGRPKPVGIKKALVFYSGKPPNGEKTNWIMHEYRLADVDRSVLKKNSLRLDDWVLCRIYNKKGVIEKRRSDIEDGLKPVTDTCPPESVARLISGSEQAVSPEFTCSNGRLSNALDFPFNYVDAIADNEIVSRLLGGNQMWSTTLDPLVVRQGTF

SEQ ID NO: 151 - protein, 303 aa, Oryza sativa
MSGGQDLQLPPGFRFHPTDEELVMHYLCRRCAGLPIAVPIIAEIDLYKFDPWQLPRMALYGEKEWYFFSPRDRKYPNGSRPNRAAGSGYWKATGADKPVGSPKPVAIKKALVFYAGKAPKGEKTNWIMHEYRLADVDRSARKKNSLRLDDWVLCRIYNKKGGLEKPPAAAVAAAGMVSSGGGVQRKPMVGVNAAVSSPPEQKPVVAGPAFPDLAAYYDRPSDSMPRLHADSSCSEQVLSPEFACEVQSQPKISEWERTFATVGPINPAASILDPAGSGGLGGLGGGGRDPLLQEILMYWGKPF

SEQ ID NO: 152 - protein, 291 aa, Cicer arietinum
MASELQLPPGFRFHPTDEELVMHYLCRKCTSQPISVPIIAEIDLYKYDPWDLPGMASYGEKEWYFFSPRDRKYPNGSRPNRAAGSGYWKATGADKPIGHPKPVGIKKALVFYAGKAPKGDKTNWIMHEYRLADVDRSIRRKNSLRLDDWVLCRIYNKKGTIEKQPNSGVINRKTDPSEIEDKKPEILTRGSGLPPHPPPQATAGMRDYMYFDTSDSIPKLHTDSSCSEHVVSPEFASEVQSEPKWNEWEKHLEFPYNYVDTTLNSGFGSQFQSNNQMSPLQDMFMYLPKTF

SEQ ID NO: 153 - protein, 303 aa, Oryza sativa
MSGGQDLQLPPGFRFHPTDEELVMHYLCRRCAGLPIAVPIIAEIDLYKFDPWQLPRMALYGEKEWYFFSPRDRKYPNGSRPNRAAGSGYWKATGADKPVGSPKPVAIKKALVFYAGKAPKGEKTNWIMHEYRLADVDRSARKKNSLRLDDWVLCRIYNKKGGLEKPPAAAVAAAGMVSNGGGVERKPMVGVNAAVSSPPEQKPVVAGPAFPDLAAYYDRPSDSMPRLHADSSCSEQVLSPEFACEVQSQPKISEWERTFATVGPINPAASILDPAGSGGLGGLGGGGSDPLLQDILMYWGKPF

SEQ ID NO: 154 - protein, 303 aa, Oryza sativa
MSGGQDLQLPPGFRFHPTDEELVMHYLCRRCAGLPIAVPIIAEIDLYKFDPWQLPRMALYGEKEWYFFSPRDRKYPNGSRPNRAAGSGYWKATGADKPVGSPKPVAIKKALVFYAGKAPKGEKTNWIMHEYRLADVDRSARKKNSLRLDDWVLCRIYNKKGGLEKPPAAAVAAAGMVSSGGGVQRKPMVGVNAAVSSPPEQKPVVAGPAFPDLAAYYDRPSDSMPRLHADSSCSEQVLSPEFACEVQSQPKISEWERTFATVGPINPAASILDPAGSGGLGGLGGGGSDPLLQDILMYWGKPF

SEQ ID NO: 155 - protein, 252 aa, Brassica napus
MKAELNLPEGFRFHPTDEELVKFYLCRRCASEPISVPVIAEIDLYKFNPWELPEMALYGEKEWYFFSPRDRKYPNGSRPNRSAGTGYWKATGADKPIGKPKTLGIKKALVFYAGKAPRGVKTNWIMHEYRLANGDRSASFNKKNSLRLDDWGLCRIYHKKGTMEKCYPAVVTTTSTSDSKCSSHVISPDVVTCSDNCESKWVDDLKDEFMFGSTLQNDSFVPQFLYQSEFATPYEDPQEQKPFLNWSFGHQG

SEQ ID NO: 156 - protein, 343 aa, Populus trichocarpa
MGVQETDPLAQLSLPPGFRFHPTDEELLVQYLCRKVAGHHFSMQIIGEIDLYKFDPWLLPSKAIFGEKEWYFFSPRDRKYPNGSRPNRVAGSGYWKATGTDKIITSDGRKVGIKKALVFYIGKAPKGTKTNWIMHEYRLIESSRKHGSTKLDEWVLCRIYKKKSIAAQKSMSGVSSKEPSTNSPSSSFSSHFDDDVLDPLPEIDDRFLDLPRTNSLKPRQHEEKINLATLGSGSFDWATLAGLNSVPQLVQTQPCVSYSNSNVHDVYVPSMSQLCHMDTSAERMENLVEEEVQSGVRTRLDSVGNPVFFQQNSSVRPQSFSNSFDPYGLRHSIQPGSGFGFNQ

SEQ ID NO: 157 - DNA, 1640 bp, Glycine max
aattaaaaaaagagaaaagcaactagagaaaaaaaaaaaagagaagaaaaaaaaacttggttttatcttctttgttattattatattcacttcttcaatatcttggttctttgatattattattcgattgagcaaaaaatgggagttccagagagagaccctcttgcacaattgagcttgcctcctggatttagattttatcccactgatgaggagcttttggttcagtacctttgccgcaaggttgctggccatcatttctctcttccaatcattgctgaagttgatttgtacaagtttgatccatgggttcttccaggtaaggcagcgtttggagagaaggagtggtacttcttcagtccaagagacaggaagtacccgaatggttcacgaccaaacagagttgcgggttctgggtattggaaagccactggaactgacaaaatcatcaccactgaaggtagaaaagttggcataaaaaaagcacttgttttctacgttggcaaagcacccaaaggctccaaaaccaattggatcatgcacgagtatcgccttctcgactcttcccgcaaacacaacctcggaaccgcaaagcttgatgattgggttctgtgtcgtatctataagaagaactcaagtgcgcaaaaggttgaggcaaatcttttggctatggaatgtagcaatgggtcatcaccttcttcatcgtcccacgtggacgacatgctggaatcgttgccggagatcgatgatcggtgcttcaccctgccgcgagtgaactcagtcagaacaatgcagcagcaggacgagaaattcggatttcagaacatgggatccgggtttttcaccgattgggtcaacccgacggatcttgattcagtttccgaatttgggtcgggttgccaaacccaagggatggtgaattatgattgtaatgacttatttgtcccttctgtgccgcccttcggccacagccatgtaaactacatggtgggggcaccaccgtccgaggaggaggttcaaagcggtgtgaggactcaacaggccgatggggccgcatgttttcagcagaacccaaatgcccgattgttaccgggctcgggcgacccatttgggtttgggttcatcatgggtcagcaagttgagttcgggtttagggactgaaggatctgatagtgttgttctgtaaataattggggattttaatttaaattctatgctcattgttatggaaaattgcaattttggtcattcttttcggctagacacatacaatgaatcggtatgaaactgagcaaggatgacccaatggtgctttcaccacagcaccgcatgctgaaaaattaattgctttgcaagacattattgggctaaatatgaatcacgttgtacttcaaagcattacatagcaactattttccaaatttaagtttagtttagagcattagatattgatatttttatgtggttggtgtcccatgcatccttgtagacaacctgatcaacaagcaatgaaccagctgtaaaattgtctagccttgctgattgtgaaaaaagtgagatccacgtgtgaagtgaacccccgtttaatgtgttaaataaatgggtttggattgattagttgaaaaaagttttcaactatg

SEQ ID NO: 158 - protein, 340 aa, Glycine max
MGVPERDPLAQLSLPPGFRFYPTDEELLVQYLCRKVAGHHFSLPIIAEVDLYKFDPWVLPGKAAFGEKEWYFFSPRDRKYPNGSRPNRVAGSGYWKATGTDKIITTEGRKVGIKKALVFYVGKAPKGSKTNWIMHEYRLLDSSRKHNLGTAKLDDWVLCRIYKKNSSAQKVEANLLAMECSNGSSPSSSSHVDDMLESLPEIDDRCFTLPRVNSVRTMQQQDEKFGFQNMGSGFFTDWVNPTDLDSVSEFGSGCQTQGMVNYDCNDLFVPSVPPFGHSHVNYMVGAPPSEEEVQSGVRTQQADGAACFQQNPNARLLPGSGDPFGFGFIMGQQVEFGFRD

SEQ ID NO: 159 - protein, 260 aa, Brassica napus
MVKAGADLQFPPGFRFHPTDEELVLMYLCRKCASQPIAAPIITELDLYRYDAWDLPDMALYGEKEWYFFSPRDRKYPNGSRPNRAAGTGYWKATGADKPIGRPKPVGIKKALVFYSGKPPRGEKTNWIMHEYRLADVDRSVRKGNSLRLDDWVLCRIYNKKGVIEKRRSEVANGHVMAPVMLNFDKPELIGGGSSCSDQRVVSPEFRCEAKTEPSRWSNALEVPFNYVDAIADNEIVSRLLGGNQMWSTLDPLVVRQRTF

SEQ ID NO: 160 - protein, 297 aa, Brassica napus
MMTAAKTVGTELQLPAGFRFHPTDEELVVHYLCRKCASQPISVPIIAEIDLYKFDPWDLPEMATYGEKEWYFFSPRDRKYPNGSRPNRAAGTGYWKATGADKPIGKPKTLAIKKALVFYAGKAPKGVKTNWIMHEYRPANVDRSAGKRTNLRLDDWVLCRIYNKKGIIEKGYYVDQKPMVQYPDFEDKKPVISPPGRNTSVGLATPSPMAPTRNDQLHFDTSDSVPHCHTDTSGSSHVVSPDFICDREVQSEPKWNELEMAFDYPFNYMEPFQSDPFGPSTVQDPMANLHDVLMFLR

SEQ ID NO: 161 - DNA, 561 bp, Brassica napus
aaaaaacatcttcacgaaccagaaacaataagaagaagaagaaaaagtgagatatggtgaaagcaggggctgatttgcaatttccaccgggatttagatttcatccgacggacgaggagctcgtcctcatgtatctctgccgtaaatgcgcgtcgcagccgatcgctgctcctatcatcactgaactcgatttgtatagatatgatgcttgggaccttcccgacatggctttgtacggagaaaaggagtggtattttttctcaccgagagaccggaagtacccaaatggttcaagaccaaaccgggcagctggtactggctattggaaagctacaggtgctgataaaccaatcggtcgtcctaaaccggtcggtataaagaaggctctagtgttttattccggaaaacctccgagaggagagaaaaccaattggattatgcatgaataccggctcgcagacgttgaccggtcggttcggaagggaaacagtttaaggctggacgattgggtgttgtgtcgtatatacaacaagaaaggtgtcatagagaagcgacggagtg

SEQ ID NO: 162 - protein, 169 aa, Brassica napus
MVKAGADLQFPPGFRFHPTDEELVLMYLCRKCASQPIAAPIITELDLYRYDAWDLPDMALYGEKEWYFFSPRDRKYPNGSRPNRAAGTGYWKATGADKPIGRPKPVGIKKALVFYSGKPPRGEKTNWIMHEYRLADVDRSVRKGNSLRLDDWVLCRIYNKKGVIEKRRS

SEQ ID NO: 163 - protein, 296 aa, Saccharum officinarum
MSGGGQDLQLPPGFRFHPTDEELVMHYLCRRCASLPIAVPIIAEIDLYKFDPWQLPRMALYGEKEWYFFSPRDRKYPNGSRPNRAAGSGYWKATGADKPVGTPKPLAIKKALVFYAGKAPKGEKTNWIMHEYRLADVDRSARKKNSLRLDDWVLCRIYNKKGGLEKPAAASSGDHKPMVFAAGAVSSPPEQKPFVATPGGLPPAAFTADLAAYYDRPSDSMPRLHADSSCSEQVLSPEQLACDREVQSQPKISEWERTFASDPVNPAGSMLVDPVVGGHAGDPLLQDILMYWGKPF

SEQ ID NO: 164 - protein, 337 aa, Ricinus communis
MGVQEMDPLTQLSLPPGFRFYPTDEELLVQYLCRKVAGHQFSLQIIGEIDLYKFDPWVLPSKAIFGEKEWYFFSPRDRKYPNGSRPNRVAGSGYWKATGTDKVITTEGRKVGIKKALVFYVGKAPKGTKTNWIMHEYRLLESSRKNGSTKLDDWVLCRIYKKNSGAQKPMTSFPSSKEHSNNGSSSSSSSHLDDVLDSLTEIDDHFFALPTAKTMQPDDKININNLGSGNFDWATLAGLNSVSELATAQQAQSQTQGLMNYTQNGDDLYVPSFQQHIGHVDIKMEEEVQSGVRTHRADSSRFLQQTSSVLTQNLSNSFDPYGFRYSAQPGSGFGFRQ

SEQ ID NO: 165 - DNA, 1304 bp, Glycine max
atgctctccccgccccttccaggacaagaagaagcccttcgatcgtccggtctagctgtttctgcttatcgatatctggtttatcgcagcagtttggagctgtcggattcgagtagctagcttagctctacaatcgagcgagaagaaggatcgaggagatgagcggcggcggcggcggaggatcggcggcgacgcaggggcagcaggatctgcagctgccgccggggttcagattccatccgacggacgaggagctggtgatgcactacctgtgccggcggtgcgccggcctgcccatctccgtgcccatcatcgccgaggtcgacctctacaagttcgacccatggcagctcccgagaatggcgctctacggcgagaaggagtggtacttcttctccccgcgcgaccgcaagtacccgaacgggtcgcggccgaaccggtcggccggcacgggctactggaaggccaccggcgccgacaagccggtgggcacgcccaagcccctggccatcaagaaggcgctcgtcttctatgccgggaaggcgccmaggggcgacaagaccaactggatcatgcacgagtaccgcctcgccgacgtcgaccgctccgcccgcaagaagaacagcctcaggttggatgactgggtgctttgccggatctacaacaagaaaggcgcctcggagaggccgagcgccggtgaccggaccgcgagcgcgagccccgggcacgcggccgtcggctcgccgccggagcagaaaccggccctgctgccgccatacgcgccgcagccgttctcggacctggcggcgtactacgaggtgaggccgtcggactcgatgccgcgggcgcacgcggactcgagctgctcggaacacgtgctgacggcgtcgtgcgagcggccggaggtgcagagccagcccaagatctccgagtgggagcgcacgttcgccacagccaccccgggcgtcaacccggccggcttgatgctcgacccggcggccgggctccccgccggcgacccgctcctccaggacatcctcatgtactggggcaagccgttctgagaatccggctccgtggctgtacgtgtggtttggcgctgggatgaaatcgatcggggtagcggccggaatctatcggcaggagatactcatagccgttggatggaagatatcagtagtgcacaaggagtcacggacggcggcgatgagacgcgggagccccggtgtgttcgaggagggacgcagagagtactcttggtgtatacggatttgaactaagctgtgtatatgcgattgatttgg

SEQ ID NO: 166 - protein, 301 aa, Glycine max
  misc_feature (130)..(130): Xaa can be any naturally occurring amino acid
MSGGGGGGSAATQGQQDLQLPPGFRFHPTDEELVMHYLCRRCAGLPISVPIIAEVDLYKFDPWQLPRMALYGEKEWYFFSPRDRKYPNGSRPNRSAGTGYWKATGADKPVGTPKPLAIKKALVFYAGKAXRGDKTNWIMHEYRLADVDRSARKKNSLRLDDWVLCRIYNKKGASERPSAGDRTASASPGHAAVGSPPEQKPALLPPYAPQPFSDLAAYYEVRPSDSMPRAHADSSCSEHVLTASCERPEVQSQPKISEWERTFATATPGVNPAGLMLDPAAGLPAGDPLLQDILMYWGKPF

SEQ ID NO: 167 - protein, 272 aa, Glycine max
MEANSSSNLPPGFRFHPTDEELIVHYLRNQTMSKPCPVSIIPEVDIYKFDPWQLPEKTEFGENEWYFFSPRDRKYPNGVRPNRAAVSGYWKATGTDKAIHSGSSNVGVKKALVFYKGRPPKGIKTDWIMHEYRLHDPRKPSTKRNGSMRLDEWVLCRIYKKKGAGKLLDEKEGFMDEVQIEETLTVVTNEAERRNEEEIMMTSTKIPRTCSLAHLLEMDYMGPISHILTPFDLHHPDYSDSMNMNQSGWFGGDQQINQEEVLNHHCQAMFQF

SEQ ID NO: 168 - DNA, 1050 bp, Solanum lycopersicum
atgggtgttcaagaaaaagatccacttttgcaattaagtttaccaccaggatttagattttatccaactgatgaagagcttttagttcaatatttatgtaagaaagttgctggacatgattttcctctacaaattattggtgaaattgatttatacaaatttgatccttgggttttacctagtaaggcgacatttggtgaaaaagaatggtatttcttcagtccgagggataggaagtatccgaatggatctagaccgaatcgagtagcaggttcgggttattggaaagcaacggggacggataaggtgataacttcgcaaggaagaaaagttggaattaagaaagctcttgtgttttatgtgggtaaagctccaaaaggatccaagacgaattggattatgcatgaatatagactttttgaatcttcaaggaaaaataatggaagttcaaagctagatgaatgggtgctttgtcgaatttataagaagaattcaagtggaccaaaacctctgatgtctggtttacacagcagtaatgaatacagccatggttcgtcgacttcgtcatcatcccaattcgatgatatgctcgaatcattaccagaaatggacgatcgattctccaatttaccgaggttgaactctctcaaggccgagaaattcaacctcgatcgtctggattcagccaatttcgattgggcaattctcgctgggctcaaaccaatgccggaattgggcccagcaaatcaagctccaggcgttcagggtcaggctcaggggcatgtcaataaccacattcacagcgacaacaacaatatgaattttctcaacgatgtttacgcccatcctccaaatttccgaggcaacacaaaggttgaaagtattaatctagacgaagaagttgaaagcgggaaaagaaatcaacggattgaccaatcgagttacttccaacagagtctcaatggattttcccaagcgtatacaaacaatgtggatcaattcgggatccaatgtccgaatcagacgttaaatctcgggttcaagcagtag

SEQ ID NO: 169 - protein, 349 aa, Solanum lycopersicum
MGVQEKDPLLQLSLPPGFRFYPTDEELLVQYLCKKVAGHDFPLQIIGEIDLYKFDPWVLPSKATFGEKEWYFFSPRDRKYPNGSRPNRVAGSGYWKATGTDKVITSQGRKVGIKKALVFYVGKAPKGSKTNWIMHEYRLFESSRKNNGSSKLDEWVLCRIYKKNSSGPKPLMSGLHSSNEYSHGSSTSSSSQFDDMLESLPEMDDRFSNLPRLNSLKAEKFNLDRLDSANFDWAILAGLKPMPELGPANQAPGVQGQAQGHVNNHIHSDNNNMNFLNDVYAHPPNFRGNTKVESINLDEEVESGKRNQRIDQSSYFQQSLNGFSQAYTNNVDQFGIQCPNQTLNLGFKQ

SEQ ID NO: 170 - DNA, 1409 bp, Panicum virgatum
attttttttttcaagactcatgcttgccttctatctaagcactactcctcctagttaattagctagtagcatctctcatctcctcctcccttcttgaggctccgatctatacagtagctagtagtcaacagtagtataaactgtgtgtagtagtagactgttgtgtagaggttgctacagagcaatccaacagctagcacatcagagctgagcagtcaccattgtttatcagtcgccatgacgagctcgactagactgcctaatcttccagctgggttccgcttccaccccacagatgaggagctcatcgtccactacctcatgaaccaagcttcctccatcccatgccctgtccccatcatcgccgaggtcaacatctaccagtgcaacccatgggatcttcctgccaaagctttgtttggagagaacgagtggtacttcttcagcccgagggatcgcaagtaccccaacggcgcccgccccaaccgcgccgccggatccggctactggaaggccaccggcaccgacaaggccatcctgttgactccgacgagcgagaacatcggagtcaagaaggcccttgtgttctacggcggtaagcctcccaagggtgtcaagacagactggatcatgcacgagtaccgcctcacaggagctaacaagaacaccaagcgtagaggatcctccatgaggctggacgactgggtcctctgcaggatccacaagaagagcaacaattttcagttgtctgatcaggaccaggaaggctccactgtggaggaagaatccctcaacaacaagatgaatggcacaattacagcctcgcccaagtctgaagccaataatgatggtcatgatcatcagttccatccgacgacgatggccatgaacaaatcatactcaatcaccgatctcctcaacaccatcgactactcggcgctctcgcagctcctcgatgccccagctgaacctgaaccaccgctaatctacccaacaacaacacaaacacatcacgaagcactacttaactataacaacaacgtgaacaatagccacttcaatatgccacaagtagacgcatattcagatcatgttgcgactaattgcaacggtctgaagaggaagcgagtgatgactatggatggtgctgaatcctccttcgacgatgatggcagcagtaacttcagtagaaaactactgaagctgccaagtgattcacggagcagcagccacagccattttggcagcacgacgagcagctactgcaaccagcagcttgtggacacgagtggttttcagcacagcagcctgctgagctatccattcctcgagatgcagtagtatctatgtagtattacaccgagagcttggtgtgaatgaattcatacagctgaaacttcgactgggtc

SEQ ID NO: 171 - protein, 367 aa, Panicum virgatum
MTSSTRLPNLPAGFRFHPTDEELIVHYLMNQASSIPCPVPIIAEVNIYQCNPWDLPAKALFGENEWYFFSPRDRKYPNGARPNRAAGSGYWKATGTDKAILLTPTSENIGVKKALVFYGGKPPKGVKTDWIMHEYRLTGANKNTKRRGSSMRLDDWVLCRIHKKSNNFQLSDQDQEGSTVEEESLNNKMNGTITASPKSEANNDGHDHQFHPTTMAMNKSYSITDLLNTIDYSALSQLLDAPAEPEPPLIYPTTTQTHHEALLNYNNNVNNSHFNMPQVDAYSDHVATNCNGLKRKRVMTMDGAESSFDDDGSSNFSRKLLKLPSDSRSSSHSHFGSTTSSYCNQQLVDTSGFQHSSLLSYPFLEMQ

SEQ ID NO: 172 - protein, 307 aa, Capsicum annuum
MIKGIVGNQQLGLPAGFRFHPTDEELVQHYLCRKCAGQSISVSIIAEIDLYKFDPWQLPEKALYGEKEWYFFSQEDRKYPNGSRPNRAAGTGYWKATGADKPVGKPKTLGIKKALVFYAGKAPRGIKTNWIMHEYRLANVDRSAGKSNNLRLDDWVLCRIYNKKGHTLRSITMWASKRGESFGEFEDEIKPKIFPTQLAPAPGQWPPRPQSTPASDYFNFETSESMTTTRMHTTNSSSGSEHVLSSCDKEVQSAPKWDDLGTAALDFQINYLDGLLNDPFEIQMQQQNCNIDQFNTFQDMFLYMQKP

SEQ ID NO: 173 - protein, 260 aa, Mikania micrantha
MNCGDLELPPGFRFHPTDDELVMHYLCRKCASQPISVPIIAEIDLYKFDPWQLPGMALYGEKEWYFFSPRDRKYPNGSRPNRAAGTGYWKATGADKPIGKPKPVGIKKALVFYAGKAPRGVKTNWIMHEYRLANVDRSAGKRNNNLRLDDWVLCRIYNKKGTLEEHHVGGDPEVETKPKIIPPSSLTARNDVFHFDPSESVPTLHTDSSPEQSVQSDSNPFSYMDPFQNDHFTPQSQYYNDFQLSPLQDMFMYTSKPFQM

SEQ ID NO: 174 - protein, 265 aa, Vitis vinifera
MMSGDQLQLPAGFRFHPTDEELVVHYLVRKCASQSISVPIIAEVDLYKYDPWQLPGMALYGEKEWYFFSPRDRKYPNGSRPNRAAGSGYWKATGADKPIGRPKTVGIKKALVFYAGKAPRGVKTNWIMHEYRLANVDRSAGKKNNLRLDDWVLCRIYNKKGSAEKQHTFDQKSMKYPELEDQKPKIISTTSDSVPRLHTHTDSSGSEQVMSPEKEVQSEPKWNDFDFSLYMDGFANDPFASQAQFSGDLLTSSWQDMLMFSNKSF

SEQ ID NO: 175 - protein, 337 aa, Glycine max
MGVPERDPLAQLSLPPGFRFYPTDEELLVQYLCRKVAGHHFSLPIIAEVDLYKFDPWVLPGKAVFGEKEWYFFSPRDRKYPNGSRPNRVAGSGYWKATGTDKIITTEGRKVGIKKALVFYIGKAPKGSKTNWIMHEYRLLDSSRKHNLGTAKLDDWVLCRIYKKNSSSQKVEANFLAMECSNGSSPSSSSHVDDMLGSLPEINDRCFTLPRVNSLRTMHQQDEKFGSPNMGSGFFSDWVNSTDLDSISEFESGCQTQRMVNYDCNDFFVPSLPPLGHVDYMVDAPLEEEVQSGVRTRRVDGPGHFQPNPDTRLLPGSGDPFGFGFIMGQQVEFGFRD

SEQ ID NO: 176 - protein, 345 aa, Glycine max
MGVPEEDPLSQLSLPPGFRFYPTDEELLVQYLCRKVAGHHFSLPIIAEIDLYKFDPWVLPSKAIFGEKEWYFFSPRDRKYPNGSRPNRVAGSGYWKATGTDKIITTEGRKVGIKKALVFYIGKAPKGTKTNWIMHEYRLLDSSRKNTGTKLDDWVLCRIYKKNSSAQKAVQNGVVPSNEHTQYSNGSSSSSSSQLDDVLESLPAIDERCFPMPRVNTLQQQQHEEKVNVQNLGEGGLLDWTNPSVLNSVVDFVSGNNNHNQLVQDQTQGMVNYNACNDLYVPALCHVGTSVPQKMEEEVQSGVRNQRVQNNSWFLQNDFTQGFQNSVDTSGFKYPVQPVGFGFRN

SEQ ID NO: 177 - protein, 278 aa, Brassica napus
MKAELNLPAGFRFHPTDEELVKFYLCRKCASEEISAPVIAEIDLYKFNPWELPEMSLYGEKEWYFFSHRDRKYPNGSRPNRAAGTGYWKATGADKPIGKPKTLGIKKALVFYAGKAPKGIKTNWIMHEYRLANVDRSASLNKKNNLRLDDWVLCRIYNKKGTMEKYYPADEKPRTTTSMADQSSSPFDTSDSTYQNDSSSSGGHVVSPDAKEVQSEPKWGELEDALEAFDTSMFGGSMDLLQSDGFVPQYLYQPDYFTPFQDPHEQKPFLNWSFAPQG

SEQ ID NO: 178 - protein, 359 aa, Triticum aestivum
MPMGSSSAAMPALPPGFRFHPTDEELIVHYLGRQAASMPSPVPIIAEVNIYKCNPWDLPGKALFGENEWYFFSPRDRKYPNGARPNRAAGSGYWKATGTDKAILSTPANESIGVKKALVFYRGKPPKGVKTDWIMHEYRLTAADNRTTKRRGSSMRLDDWVLCRIHKKCNNLHNFSSSDQEQEHEQESSTTVEDSHNNHTVSSPKSEAFDGDGDDQLQLQQFRPMAIAKSCSLTDLLNTVDYAALSHLLLDGAGAGASSSDAGADYQLPPENPLIYSQPPWQQTLHYNNNNNGYVNIDTIDVPQIPEARVDDYGMNGDRYNGMKRKRSSGSLYCSQLQLPADQYSGMLIHPFLSQQLHM

SEQ ID NO: 179 - protein, 294 aa, Vitis vinifera
MMSGDQLQLPAGFRFHPTDEELVVHYLVRKCASQSISVPIIAEVDLYKYDPWQLPGMALYGEKEWYFFSPRDRKYPNGSRPNRAAGSGYWKATGADKPIGRPKTVGIKKALVFYAGKAPRGVKTNWIMHEYRLANVDRSAGKKNNLRLDDWVLCRIYNKKGSAEKQHTFDQKSMKYPELEDQKPKIISTVQNKVVPSSLPSLPPMPAPPTTNDYLYFETSDSVPRLHTHTDSSGSEQVMSPEKEVQSEPKWNDFDFSLYMDGFANDPFASQAQFSGDLLTSSWQDMLMFSNKSF

SEQ ID NO: 180 - protein, 298 aa, Cucumis melo
MTVAGLELPPGFRFHPTDEELVLHYLCRKCSSQPIAVPIIKEIDLYKYDPWHLPELAVCGEKEWYFFSPRDRKYPNGSRPNRAAGTGYWKATGADKPIGRPKTLGIKKALVFYAGKAPRGVKTNWIMHEYRLANVDRSAANKTNNLRLDDWVLCRIYNKKGCIEKHYQSTDDKAAEFPDFEDEKPNITTNNMVQLPLHNQLQMETSDSVPRMQTESSSGSDLVTSPELTWDKEVQSQSKWEGEGGGERAAVADFDFFEFNYMDSFSMPEDVPFGSQVQFQMDHLSPLQDMFSYLQRQI

SEQ ID NO: 181 - protein, 307 aa, Populus trichocarpa
MKVNGSAAADQLELPAGFRFHPTDDELVNHYLIKKCGGQSISVPIIAEIDLYKYDPWQLPEMALYGEKEWYFFSPRDRKYPNGSRPNRAAGTGYWKATGADKPIGRPKPLGIKKALVFYAGKAPRGIKTNWIMHEYRLANVDRSAGKKNNLRLDDWVLCRIYNKKGSIEKHFPADRKSITKYAEMEEQKPNINEMSGYKNGGSTMGAPTMMMSNSNDLLNMDTSDSTPRLHTDSSCSEQVLSPELTCEREVQSQPKSWNDQLDSAFDFNFNYIDDGFQDDPFASQVQFQMDQLSPLQDMFMYLQRPL

SEQ ID NO: 182 - protein, 346 aa, Ricinus communis
MESTDSSSGSQQPNLPPGFRFHPTDEELVVHYLKKKASSAPLPVAIIAEVDLYKFDPWELPAKATFGEQEWYFFSPRDRKYPNGVRPNRAATSGYWKATGTDKPVLTSGGTQKVGVKKALVFYGGKPPKGIKTNWIMHEYRLADNKVSNKPPGCDLANKKNSLRLDDWVLCRIYKKNNTNRPMDQEKDDSMEDMLGSIPPSLTIGSQQNARLQLLKGTNYGTLVENDTSFFNDHSISNTNSISQLASSTCSRPGDLSMLPLKRTLPSLYWSDDVDMAASPSSSKRYQGDHTGDESVVRSDGNGSFVSLLSQLPQTPPLHQQQATLGSIGDGIFRPPYQLSGLNWYS

SEQ ID NO: 183 - protein, 292 aa, Medicago truncatula
MQGELELPPGFRFHPTDEELVNHYLCRKCAGQSISVPVVKEVDLYKFDPWQLPEMGYHSEKEWYFFSPRDRKYPNGSRPNRAAGSGYWKATGADKPIGKLKPMGIKKALVFYAGKAPKGVKTNWIMHEYRLANVDRSAGKKNNLRLDDWVLCRIYNKKGKIEKFNTSNTPKVQNYYEHEEVEEHEMKPEIQKLGNYQLYMDTSDSVPKLHTDSSSSGGHVVSPDVTCDREVQSEPKWNDLGIQLDDAFDFQLNYLENALSFDIDDDPFGTNQYQMNQLSPLQDMFMYPQKPF

SEQ ID NO: 184 - protein, 203 aa, Physcomitrella patens
MVILASPTGGPVTQLQLPPGFRFHPTDEELVLHYLCRKAESHVFAIPVIAEIDLYKFDPWDLPGKAIFGEREWYFFSPRDRKYPNGARPNRAAASGYWKATGTDKPIHTSVGGIRKIGVKKALVFYKGRAPKGVKTNWIMHEYRLAEGVCASVHAHRKGSLRLDDWVLCRIYKKSTNAQRTGKERDSSSCVEEVSKLSFGSHS

SEQ ID NO: 185 - protein, 264 aa, Physcomitrella patens
MSSGDLQLPPGFRFHPTDVELVMHYLCRKCAGLPLAVPIIAEIDLYKFDPWQLPEMALYGEKEWYFFTPRDRKYPNGSRPNRAAGSGYWKATGADKPVGSPKPIAIKKALVFYSGKAPKGDKSNWIMHEYRLADVDRSVRRKNSLRLDDWVLCRIYKKKGGAEKVGGADKTPAGSRMIRPLLEPKPEFIPQVPQFNSNGNTDYFCLDMADSMPKLHAESSCSEHVLSPEFTCEREVESQLKWNELERALGVANNYADATTALAL

SEQ ID NO: 186 - protein, 285 aa, Brassica napus
MSELQLPPGFRFHPTDEELVMHYLCRKCASQSIAVPIIAEIDLYKYDPWELPGLALYGEKEWYFFSPRDRKYPNGSRPNRSAGSGYWKATGADKPIGLPKPVGIKKALVFYAGKAPKGEKTNWIMHEYRLADVDRSSAARKKKNSLRLDDWVLCRIYNKKGAIEKRGPPPTPVVYGDEVVEEKPRLSEMGMPPPPVMPNDFVYFDTSDSVPKLHTTESSCSEQVVSPEFTSEVQSEPKWKDWSGEKSSLDFGFNYIDATAFGGGGGSNQLFPLQDMFMYNMPKPY

SEQ ID NO: 187 - protein, 233 aa, Populus trichocarpa
MGLQETDPLAQLSLPPGFRFHPTDEELLVQYLCKKVAGHHFSLQIIGEIDLYKFDPWFLPGKAIFGEKEWYFFSPRDRKYPNGSRPNRVAGSGYWKATGTDKVITTEGRKVGIKKALVFYVGKAPKGTKTNWIMHEYRLLESSRKSGSTKLDEWVLCRIYKKNSSAAQKSMSSVSSKEYSTNGSCSSSSSHLEDVLDSLTEIDDRLFALPRTNSLKQMQRRENQLSKSGFREL

SEQ ID NO: 188 - protein, 317 aa, Arabidopsis thaliana
MGLQELDPLAQLSLPPGFRFYPTDEELMVEYLCRKAAGHDFSLQLIAEIDLYKFDPWVLPSKALFGEKEWYFFSPRDRKYPNGSRPNRVAGSGYWKATGTDKVISTEGRRVGIKKALVFYIGKAPKGTKTNWIMHEYRLIEPSRRNGSTKLDDWVLCRIYKKQTSAQKQAYNNLMTSGREYSNNGSSTSSSSHQYDDVLESLHEIDNRSLGFAAGSSNALPHSHRPVLTNHKTGFQGLAREPSFDWANLIGQNSVPELGLSHNVPSIRYGDGGTQQQTEGIPRFNNNSDVSANQGFSVDPVNGFGYSGQQSSGFGFI

SEQ ID NO: 189 - DNA, 984 bp, Sorghum bicolor
atggactgcggtggcgcgctgcagctcccgcccgggttccggttccaccccaccgacgacgagctggtgatgtactacctcctccgcaagtgcggcggcctgcccctcgccgcgccggtcatcgccgaggtcgacctctacaagttcgatccatggcagctcccagagaaggcgtatggtggggagaaggagtggtacttcttctcgccgagggaccgcaagtacccgaacgggtcgaggccgaacagggcggccgggacggggtactggaaggccaccggcgccgacaagcccgtcgggtcgccgcgccccgtcgccatcaagaaggccctcgtcttctacgccggcaagccgcccaagggcgtcaagaccaactggatcatgcacgagtaccgcctcgccgacgtcgaccgttccgccgccgcacgcaagaagaccaacaacgccctcaggctggatgactgggtgctgtgccggatctacaacaagaagggcgtgatcgagcggtacgacacggtggacgacgacgccgacgacgccgtggcagaggacgtcaagcctgcgccggcgtccaggaataacccgcgcgggaccgccagtggccgcggcggggcagcagcagcagcggcgccgatgaaggtggagttcccggagtacggtgggtactacgactacgaagacctcgaggcgacgccgtcggcggggatgctgtgcttcgatcgcccctgcggctccgagcacgtgctgtcgccgtcgccggacctccccgaccgcgaccacgccgagagccagtccgccgggttatggtggcccgtcggcgtcggcggcgactgggccgccgccgaggacgggttcatggtcgacgtcgacgtcgacgacgggagctcgctgttcgggccgccgtccccggggctgccgttcgctcgcgtcgacgccgccgcgttcggcgacatgctcgcgtcgtacctccacaagccgttctga

SEQ ID NO: 190 - protein, 327 aa, Sorghum bicolor
MDCGGALQLPPGFRFHPTDDELVMYYLLRKCGGLPLAAPVIAEVDLYKFDPWQLPEKAYGGEKEWYFFSPRDRKYPNGSRPNRAAGTGYWKATGADKPVGSPRPVAIKKALVFYAGKPPKGVKTNWIMHEYRLADVDRSAAARKKTNNALRLDDWVLCRIYNKKGVIERYDTVDDDADDAVAEDVKPAPASRNNPRGTASGRGGAAAAAAPMKVEFPEYGGYYDYEDLEATPSAGMLCFDRPCGSEHVLSPSPDLPDRDHAESQSAGLWWPVGVGGDWAAAEDGFMVDVDVDDGSSLFGPPSPGLPFARVDAAAFGDMLASYLHKPF

SEQ ID NO: 191 - protein, 343 aa, Glycine max
MGVPEKDPLSQLSLPPGFRFYPTDEELLVQYLCRKVAGHHFSLPIIAEIDLYKFDPWVLPSKAIFGEKEWYFFSPRDRKYPNGSRPNRVAGSGYWKATGTDKIITTEGRKVGIKKALVFYVGKAPKGTKTNWIMHEYRLLDSSRKNTGTKLDDWVLCRIYKKNSSAQKTAQNGVVPSNEHTQYSNGSSSSSSSQLEDVLESLPSIDERCFAMPRVNTLQQQQHHEEKVNVQNLGAGGLMDWTNPSVLNSVADFASGNNQVVQDQTQGMVNYNCNDLYVPTLCHLDSSVPLKMEEEVQSGVRNQRVGNNNSWFLQNDFTQGFHNSVDTCGFKYPVQPVGFGFRN

SEQ ID NO: 192 - protein, 311 aa, Nicotiana tabacum
MIKGVHRNQQQLELPAGFRFHPTDEELVQHYLCRKCAGQPISVSIIAEIDLCKFDPWQLPEKASHGEKEWYFFSPRDRKYPNGSRPNRAAGAGYWKATGADKPVGKPKTLGIKKALVFYAGKAPRGIKTNWIMHEYRLANVDRSAGKSNNNLRLDDWVLCRIYNKKGTLEKYYNVDNKEHLGFDEVEEEEEKPKVLPFSQSNELIAQLAPAPMPPRPQSMPGYFHFETSESMTRMHTTNSSSGSEHVLSSCNKEVQSAPKWDDLDNALDFQLNYLDSFQYDPFEPQMQQQNCNIDQFNSFQDMFVYMQKPY

SEQ ID NO: 193 - protein, 317 aa, Arabidopsis lyrata
MGLQELDPLAQLSLPPGFRFYPTDEELMVEYLCRKAAGHDFSLQLIAEIDLYKFDPWVLPSKALFGEKEWYFFSPRDRKYPNGSRPNRVAGSGYWKATGTDKVISTEGRRVGIKKALVFYIGKAPKGTKTNWIMHEYRLIEPSRRNGSTKLDDWVLCRIYKKQSSAQKQAYNNLMTSGREYSNNGSSTSSSSHQYDDVLESLHEIDNRSLGFAAGSSNSLPRCHRPVLTNQKTGFHGLAREPSFDWANLVGQNSVPELGLSQNVPSLRYGDGGTQQQAEGIPRFNYNSDVLAHQGFSVDPVNGFGYSGQQSSGFGFI

SEQ ID NO: 194 - protein, 339 aa, Cymbidium hybrid
MSTSSVHLPPGFRFHPTDEELILHYLRNRAASSPCPASIIAEVDIYKFDPWDLPEKAAFGDREWYFFTPRDRKYPNGNRPNRAAGSGYWKATGTDKPISSGSENIGVKKALVFYKGRPPKGLKTNWIMHEFRLADANKSNSYKPIRLRDHSMRLDDWVLCRIYRKSNHLSPTEMDQEQEDPCGEETCFPAMQNQMMPMNHGMKLQKVSSISEFLQEYSPLLNLFDNQQEIPRFDSNSLLGHPLLSQSMINQNQDSGGNGYFLPQLSQAESPVSIGAKRQRMDDCTNEESNGTSHSSKKQNDLNMFPNFSSQFDGSQYGLLSQPFFSQQLLMNSNTGSLH

SEQ ID NO: 195 - protein, 283 aa, Lotus japonicus
MKGELELPPGFRFHPTDEELVNHYLCTKCAGQSFNYSVIKEIDLYKFDPWQLPEMGFDGEKEWYFFSPRDRKYPNGSRPNRAAGSGYWKATGADKPIGKPKALGIKKALVFYVGKAPKGIKTNWIMHEYRLANVDRSAGKKSNLRLDDWVLCRIYNKKGKIEKYNTPTPKFSGLGEVHDSYDEHEHERKPEIHDQLYMEASDSVPRLHTDSSGSEHAASPDVTCDKEVQSEPQWNNELEFKLDDGTFDFQFSFLDDNNMSVDEYQLNQLSPLQDMFMYLEKPF

SEQ ID NO: 196 - DNA, 637 bp, Panicum virgatum
aagaacatcgacgaatccacaggacaccgccagagctcgctctcaaccagcagcagcagccggagctgaggagagcgttgcggtttcagagtgggagggagaaatcaaggagcccgcttcagtctgccgatcaattgcagcttcatcttccccggccgatcagcgatcgccatgggagtgccggtgaggagggagagggacgcggaggcggagctgaacctcccgccggggttccggttccacccgacggacgacgagctggtggagcactacctgtgccggaaggcggcggggcagcgcctcccggtgcccatcatcgcggaggtggacctgtacaagttcgacccctgggacctgccggagcgcgcgctgttcggcacccgggagtggtacttcttcacgcccagggaccgcaagtaccccaaccgctcgcgccccaaccgcgccgccgggaacggctactggaacgccaccggcaccgacaagcccgtcgctccgcgggggcgcacgctggggatcaagaaggcgctcgagttctacgccggcaaggcgccgcgcggggtccagaccgactggatcatgcacgagtacaggcctcgccgacccccgcccccgccgccccggccaagaaggggtc

SEQ ID NO: 197 - protein, 155 aa, Panicum virgatum
MGVPVRRERDAEAELNLPPGFRFHPTDDELVEHYLCRKAAGQRLPVPIIAEVDLYKFDPWDLPERALFGTREWYFFTPRDRKYPNRSRPNRAAGNGYWNATGTDKPVAPRGRTLGIKKALEFYAGKAPRGVQTDWIMHEYRPRRPPPPPPRPRRG

SEQ ID NO: 198 - protein, 286 aa, Brassica napus
MSELQLPPGFRFHPTDEELVMHYLCRKCASQSIAVPIIAEIDLYKYNPWELPGLALYGEKEWYFFSPRDRKYPNGSRPNRSAGSGYWKATGADKPIGLPKPVGIKKALVFYAGKAPKGEKTNWIMHEYRLADVDRSAARKKKNSLRLDDWVLCRIYNKKGAIEKRGPPPTPVVYGDEVVEEKPRLSEMGMPPPPVMPNDFVYFDTSDSVPKLHTTESSCSEQVVSPEFTSEVQSEPKWKDWSGAANDKNSLDFGFNYIDATAFGGVGSNQLFPLQDMFMYNMPKPY

SEQ ID NO: 199 - protein, 355 aa, Ricinus communis
MESTDSSSGSQHPHLPPGFRFHPTDEELVVHYLKKKAASAPLPVTIIAEVDLYKFDPWELPSKATFGEQEWYFFSPRDRKYPNGARPNRAATSGYWKATGTDKPILASNGAQKVGVKKALVFYGGKPPKGIKTNWIMHEYRLVDNNNSSSKPPGFDLANKKGSLRLDDWVLCRIYKKNNSQRTMDRDKEDSMEGFLATLPINPKPASSSVSKPAHAYGSVLDNEENFFEGILTGGDGMQNSSVSHQFPSSSPKQHMSIASISTSNPLAIKRVIPSQYWNHEAIAGSSIAAASSGKRFHGDLNSCSTGTEDNTSFVSLLSQLPQAGAPFHSNTFIGSLGDGVLRQQFQLPSMNWNS

SEQ ID NO: 200 - protein, 330 aa, Oryza sativa
MECGGALQLPPGFRFHPTDDELVMYYLCRKCSGLPLAAPVIAEVDLYKFNPWDLPERAMGGEKEWYFFSPRDRKYPNGQRPNRAAGTGYWKATGADKPVGSPRAVAIKKALVFYAGKPPKGVKTNWIMHEYRLADVDRSAAARKLSKSSHNALRLDDWVLCRIYNKKGVIERYDTVDAGEDVKPAAAAAAKGGRIGGGGGAAAMKVELSDYGFYDQEPESEMLCFDRSGSADRDSMPRLHTDSSGSEHVLSPSPSPDDFPGGGGGDHDYAESQPSGGCGGWPGVDWAAVGDDGFVIDSSLFELPSPAAFSRGGGDGAAFGDMFTYLQKPF

SEQ ID NO: 201 - protein, 282 aa, Solanum tuberosum
MVGKTSSDLPPGFRFHPTDEELIMYYLRYQATSRPCPVSIIPEIDIYKFDPWELPEKAEFGENEWYFFTPRDRKYPNGVRPNRAAVSGYWKATGTDKAIYSANKYVGIKKALVFYKGKPPKGVKTDWIMHEYRLSDSKSQTYSKQSGSMRLDDWVLCRIYKKKNLGKTIEMMKVEVEELEAQNVSINNAIEVVGGPQTMKLPRICSLSHLLELDYYGSIPQLLSDNLLYDDQSYTMNNMSNTSNVDQVSSQQQNTNNITSNNCNIFFNYQQPLFVNPTFQSQ

SEQ ID NO: 202 - protein, 317 aa, Arabidopsis thaliana
MGLQELDPLAQLSLPPGFRFYPTDEELMVEYLCRKAAGHDFSLQLIAEIDLYKFDPWVLPSKALFGEKEWYFFSPRDRKYPNGSRPNRVAGSGYWKATGTDKVISTEGRRVGIKKALVFYIGKAPKGTKTNWIMHEYRLIEPSRRNGSTNLDDWVLCRIYKKQTSAQKQAYNNLMTSGREYSNNGSSTSSSSHQYDDVLESLHEIDNRSLGFAAGSSNALPHSHRPVLTNHKTGFQGLAREPSFDWANLIGQNSVPELGLSHNVPSIRYGDGGTQQQTEGIPRFNNNSDVSANQGFSVDPVNGFGYSGQQSSGFGFI

SEQ ID NO: 203 - protein, 364 aa, Malus x domestica
MECTDSSAGSQQQQHQQPPPPQPNLPPGFRFHPTDEELVVHYLKKKATSAPLPVAIIAEVDLYKFDPWELPAKATFGEQEWYFFSPRDRKYPNGARPNRAATSGYWKATGTDKPVLTSGDTQKVGVKKALVFYGGKPPKGIKTNWIMHEYRLADNKPNNKPPGCDLGNKKNSMRLDDWVLCRIYKKNNTHRPMDHEREDSMEDIMGPLMPPSISHVGHHQNMKLHFPKSNSSYGPPFMENDQIFFDGIMSSTDGSASTHQLQLKRPIVPSWYWNNQEDDQTAADPSSSKRIQLHQLDNGTNSNGAGINGGSTNNNSSSIANLLSQLPQTPPLHQHAVLGSLGDGIFRTPYQLPGMNWYSESNLG

SEQ ID NO: 204 - DNA, 852 bp, Gossypium hirsutum
gcctctcaaaacaaaccataaaagtcctatgatgctcttcttctctggtaaactttcagaattcaaagtaaaatattctcaatttcattactgagttatatatacatacatatatatatttgaaggtgtcgcaatggagagcaccgactcgtcgaccggatcacagcagccgaacctcccaccgggattccggttccaccccactgatgaggaactagtggtacactacctcaagaaaaaagctagctccgctcctttgccggttgcaattattgctgaggttgatttgtacaagtttgatccatgggaattgccagcgaaggcaacgtttggtgaacaagaatggtacttttttagtccgagagacaggaagtatccgaatggagcgagaccgaacagggcggctacctcgggttactggaaggcaaccgggacggataagccggtgttgacttcgggagggactcaaaaggttggtgtgaagaaggcactggttttttatggagggaagccccctaaagggatcaaaaccaattggatcatgcatgaatataggcttgctgataataagactaacaacaaaccccctggatgtgacttgggcaacaagaaaaactcactaaggcttgatgattgggtgttatgtcgaatctacaagaaaaacaacgcgaatagacctctggaacatgataaagatgactccatggatgacatgcttggtactgtaccaccttcgatatcaatcggtagccaacataatccaaaattccacttctcaacaaagggaacaagttttggcacattactagaacatcaagaacataatagtctgtttgatggaatgatggggag

SEQ ID NO: 205 - protein, 239 aa, Gossypium hirsutum
MESTDSSTGSQQPNLPPGFRFHPTDEELVVHYLKKKASSAPLPVAIIAEVDLYKFDPWELPAKATFGEQEWYFFSPRDRKYPNGARPNRAATSGYWKATGTDKPVLTSGGTQKVGVKKALVFYGGKPPKGIKTNWIMHEYRLADNKTNNKPPGCDLGNKKNSLRLDDWVLCRIYKKNNANRPLEHDKDDSMDDMLGTVPPSISIGSQHNPKFHFSTKGTSFGTLLEHQEHNSLFDGMMG

SEQ ID NO: 206 - DNA, 1293 bp, Arabidopsis thaliana
aagtttcaaaaacgccaagtttcagaggtagagagagagatactacaattgattaggataggatcaggatcatcctcaacaacctcctcctaattcctcctccattcatagtaacaataatattaagaaagagggtaaactatgtcagaattattacagttgcctccaggtttccgatttcaccctaccgatgaagagcttgtcatgcactatctctgccgcaaatgtgcctctcagtccatcgccgttccgatcatcgctgagatcgatctctacaaatacgatccatgggagcttcctggtttagccttgtatggtgagaaggaatggtacttcttctctcccagggacagaaaatatcccaacggttcgcgtcctaaccggtccgctggttctggttactggaaagctaccggagctgataaaccgatcggactacctaaaccggtcggaattaagaaagctcttgttttctacgccggcaaagctccaaagggagagaaaaccaattggatcatgcacgagtaccgtctcgccgacgttgaccggtccgttcgcaagaagaagaatagtctcaggctggatgattgggttctctgccggatttacaacaaaaaaggagctaccgagaggcggggaccaccgcctccggttgtttacggcgacgaaatcatggaggagaagccgaaggtgacggagatggttatgcctccgccgccgcaacagacaagtgagttcgcgtatttcgacacgtccgattcggtgccgaagctgcatacgacggattcgagttgctcggagcaggtggtgtcgccggagttcacgagcgaggttcagagcgagcccaagtggaaagattagtcggccgtaagtaatgacaataacaatacccttgattttgggtttaattacattgatgccaccgtggataacgcgtttggaggaggagggagtagtaatcagatgtttccgctacaggatatgttcatgtacatgcagaagccttactagaagggaattcctttcctgccgccgaaacgcaacgcaaaacgaccctcgtttttgcgtttatggcaacacgagaccgttttatatggtcaatgagtgtgccgattcggccattagatttctgttcagtgttcgtttattctatagaccgtccgatttcagatcatccctaatcggacggtggtcgttggatgtatcagtagtgtattactgtgttaggtagaagaaaatccacttgttcttaaattggcataaaagtcagaagctaatatttatatgtgccac

SEQ ID NO: 207 - protein, 239 aa, Arabidopsis thaliana
MSELLQLPPGFRFHPTDEELVMHYLCRKCASQSIAVPIIAEIDLYKYDPWELPGLALYGEKEWYFFSPRDRKYPNGSRPNRSAGSGYWKATGADKPIGLPKPVGIKKALVFYAGKAPKGEKTNWIMHEYRLADVDRSVRKKKNSLRLDDWVLCRIYNKKGATERRGPPPPVVYGDEIMEEKPKVTEMVMPPPPQQTSEFAYFDTSDSVPKLHTTDSSCSEQVVSPEFTSEVQSEPKWKD

SEQ ID NO: 208 - DNA, 1217 bp, Panicum virgatum
aagccctcctcccctcttcctaccattagcagaagagaagaagacagaggctctgcgcagagcagcagcaacagctgagcgcgatcgatcgagagagagagacagacacgatgagcggcggcggtcaggacctgcatctgccgccggggttccggttccacccgacggacgaggagctggtgatgcactacctctgccgccagtgcgctgggctccccatcgccgtccccatcatcgccgagatcgacatctacaagttcgacccatggcagctccccagaatggcgcagtacggcgagaaggagtggtacttcttctccccgcgggaccgcaagtacccgaacgggtcgcggccgaaccgcgccgccgggtctgggtactggaaggccaccggtgccgacaagcccgtgggcacgcccaagcccctcgccatcaagaaggcgctcgtcttctacgccggcaaggcgcccaagggcgagaagaccaactggatcatgcacgagtaccgcctcgccgacgtcgaccgctccgcccgcaagaagaacagcctcaggctggatgactgggtcctgtgccgcatctacaagaagaagggcgggctggagaagccgccggtgggcgccggcgaccgcaagccggcgctcgccgcggcggcgggctccccgccggagcagaagccgttcgtggcgtcggcgggcgggctgccccccgcgttcgcggacctggcggcgtactacgaccggccgtcggactcgatgccgcggctgcacgcggactcgagctgctcggagcaggtgctgtccccggagcagcagttcgcctgcgaccgggaggtgcagagccagcccaagatcagcgagtgggagcgcaccttctcctccgaccccgtgaaccccgccggctccatgctcgaccccggcgccggcgacccgctgctgcaggacatcctcatgtactggggcaagccgttctagaggtcacgtacgcgcgcgaaccaagggaacggcagagcgttgcgcagccccatcctggggtgcggttggttggcctgcctctctctcggcggcgcaaccgccgcggcgtgggcttgactcaggcgagccgccatagctgactagtactaagagctttaaaaaatggatggattggacggagatgtcatcgtcatcatcccatcataaactaaaacaagatgatggactgggattcgaggcggc

SEQ ID NO: 209 - protein, 287 aa, Panicum virgatum
MSGGGQDLHLPPGFRFHPTDEELVMHYLCRQCAGLPIAVPIIAEIDIYKFDPWQLPRMAQYGEKEWYFFSPRDRKYPNGSRPNRAAGSGYWKATGADKPVGTPKPLAIKKALVFYAGKAPKGEKTNWIMHEYRLADVDRSARKKNSLRLDDWVLCRIYKKKGGLEKPPVGAGDRKPALAAAAGSPPEQKPFVASAGGLPPAFADLAAYYDRPSDSMPRLHADSSCSEQVLSPEQQFACDREVQSQPKISEWERTFSSDPVNPAGSMLDPGAGDPLLQDILMYWGKPF

SEQ ID NO: 210 - DNA, 915 bp, Populus trichocarpa
atgaaaggaaatagatcagcagatcagttggagttaccagctggatttagatttcatccaacagatgatgagttggtgaatcattacttgcttaagaaatgtggaggccaatcaatttctgctcctattattgctgagattgatctttataagtatgatccttggcagcttccagaaatggcactatatggtgaaaaggaatggtacttcttttctccaagggatagaaaatatccaaacggttcaaggccgaaccgggcggctggaaccgggtattggaaagcaaccggagcagataaacccattggtcggcccaaaccactaggcataaaaaaagctcttgtattttatgctggtaaagctcctaaaggaatcaaaaccaattggatcatgcatgaatatcgccttgctaatgttgacaggactgccggcaagaaaaataacctcaggcttgatgattgggtattatgtagaatatacaacaagaaaggaagcgtagagaagcattttcctgctgaaagaaaatcaatagcaaagtatccagagatggaagagcagaagcccaacatcagtgaaatgtctggctatcataatggaatgtcacaaattgcagcaccgacaatgatgatgagtaatagcaatgacttcttatatatggacacatctgattcaattccaaggttgaatacagactcaagtagttcagagcacgtgctgtcacctgaggtcacatgcgagaaggaggttcagagtcagccaaaatggaatgatcagctagataatgccttcgatttcaacttcaattacattgatgatggcttccaagattacccttttgcttcacaagatcagttccaattggaccagctctcacctttgcaggacatgttcatgtatttacagaagccattttga

SEQ ID NO: 211 - protein, 304 aa, Populus trichocarpa
MKGNRSADQLELPAGFRFHPTDDELVNHYLLKKCGGQSISAPIIAEIDLYKYDPWQLPEMALYGEKEWYFFSPRDRKYPNGSRPNRAAGTGYWKATGADKPIGRPKPLGIKKALVFYAGKAPKGIKTNWIMHEYRLANVDRTAGKKNNLRLDDWVLCRIYNKKGSVEKHFPAERKSIAKYPEMEEQKPNISEMSGYHNGMSQIAAPTMMMSNSNDFLYMDTSDSIPRLNTDSSSSEHVLSPEVTCEKEVQSQPKWNDQLDNAFDFNFNYIDDGFQDYPFASQDQFQLDQLSPLQDMFMYLQKPF

SEQ ID NO: 212 - protein, 284 aa, Chrysanthemum x morifolium
MTLELPPGFRFHPNDEELVMHYLIRKCASQSISVPIIADIDLYKFDPWQLPGMALYGEKEWYFFSPRDRKYPNGSRPNRAAGTGYWKATGADKPIGKPKAVGIKKALVFYAGKAPRGVKTNWIMHEYRLANVDRSAGKRSNNLRLDDWVLCRIYNKKGVLEKHLHSDVQSTHMSEMEIETKPKITPYARVSYTSSSHPPLSIPHHVMDDEFNFESSESVLTLHTDSSSEHEREVQSEVKKDDFQFNYMDSFADDAFTPQNQYYNDFQLSPLQDMFMFMPKSYQM

SEQ ID NO: 213 - protein, 336 aa, Malus x domestica
MGVPETDPLSQLSLPPGFRFYPTDEELLVQYLCRKVAGYQFNLQIIAEIDLYKFDPWVLPSKAIFGEKEWYFFSPRDRKYPNGSRPNRVAGTGYWKATGTDKVITTEGKKVGIKKALVFYVGKAPKGIKTNWIMHEYRLIEPSRKNGSSKLDEWVLCRIYKKSTSSAAAAAAQKSVTSVSGKEHSNGSSSPCSSQLDDGLEWLPDIDDRFFTLPRINSLKTLQQQDSKLNFQNTGSGNFDWASLAGLNSAAELGLNNQTQQGQGQVNLNYNDNDMFVPSIPSLCHVESRPERVGKTAEEEVQSGLRTQRVDNSGFIQQNSQNFCNPVRPGGFGLWQ

SEQ ID NO: 214 - protein, 331 aa, Vitis vinifera
MDSTDSSSGSHHPQLPPGFRFHPTDEELVVHYLKRKAASVPLPVTIIADVDLYKFDPWELPSKATFGEQEWYFFSPRDRKYPNGARPNRAATSGYWKATGTDKPILTSNGSQKVGVKKALVFYGGKPPKGIKTNWIMHEYRLIDSTSSNTKPPGADMGNKKGSLRLDDWVLCRIYKKNISQRPMERDKEESMEALLASLPASSMTSQQNTRAQTLRSTNFGAVLEHEEISFEGMLTGQSIQGLQSSSMSQYWNGAGSIGPSSSGKHLHTDHTSGTSTSEMDGNSSFVSLLNQLPQSGTFHQNTLLGSLADEEKFNLRNINRKKCLRRNKVG

SEQ ID NO: 215 - protein, 289 aa, Arabidopsis thaliana
MSELLQLPPGFRFHPTDEELVMHYLCRKCASQSIAVPIIAEIDLYKYDPWELPGLALYGEKEWYFFSPRDRKYPNGSRPNRSAGSGYWKATGADKPIGLPKPVGIKKALVFYAGKAPKGEKTNWIMHEYRLADVDRSVRKKKNSLRLDDWVLCRIYNKKGATERRGPPPPVVYGDEIMEEKPKVTEMVMPPPPQQTSEFAYFDTSDSVPKLHTTDSSCSEQVVSPEFTSEVQSEPKWKDWSAVSNDNNNTLDFGFNYIDATVDNAFGGGGSSNQMFPLQDMFMYMQKPY

SEQ ID NO: 216 - protein, 363 aa, Prunus persica
MESTDSSTASQQQQQQQPQPPPQPNLPPGFRFHPTDEELVVHYLKKKVTSAPLPVAIIAEIELYKFDPWELPAKATFGEQEWYFFSPRDRKYPNGARPNRAATSGYWKATGTDKPVLTSGGTQKVGVKKALVFYGGKPPKGIKTNWIMHEYRLADSKTSNKPPGCDLGNKKNSLRLDDWVLCRIYKKNNSHRPMDLEREDSMEDMMGPLMPPSISHVGHHQNMNLHLPKSNTNYGPPFIENDQIIFDGIMSSTDGSASLSNGTSQLPLKRSIVPSLYRNDQEDDQTAGASSSKRVVQLHQLDSGTNNSVAANNNSTSIANLLSQLPQTPPLHQHAMLGSLGDGLFRTPYQLPGMNWFSESNLG

SEQ ID NO: 217 - protein, 348 aa, Glycine max
MGVPERDPLAQLSLPPGFRFYPTDEELLVQYLCRKVAGHHFSLPIIAEVDLYKFDPWVLPGKAVFGEKEWYFFSPRDRKYPNGSRPNRVAGSGYWKATGTDKIITTEGRKVGIKKALVFYIGKAPKGSKTNWIMREYRLLDSSRKHNLGTAKLDDWVLCRIYKKNSSSQKVEANFLAMECSNGSSPSSSSHVDDMLGSLPEINDRCFTLPRVNSLRTMHQQDEKFGSPNMGSGFFSDWVNSTDLDSISEFESGCQTQRMVNYDCNDFFVPSLPPLGHVDYMVDAPLEEEVQSGVRTRRVDGPGHFQPNPDTRLLPGSGDPIRVWVYYGSAKLGSGLGSEVKVSESGIV

SEQ ID NO: 218 - protein, 194 aa, Solanum demissum
MVGKISSDLPPGFRFHPTDEELIMYYLRYQATSRPCPVSIIPEIDVYKFDPWELPEKAEFGENEWYFFTPRDRKYPNGVRPNRAAVSGYWKATGTDKAIYSANKYVGIKKALVFYKGKPPKGVKTDWIMHEYRLSDSKSQTYSKQSGSMRLDDWVLCRIYKKKNLGKTIEMMKVEEEELEAQNPLFVNPTFQSQ

SEQ ID NO: 219 - protein, 199 aa, Solanum demissum
MVGKISSDLPPGFRFHPTDEELIMYYLRYQATSRPCPVSIIPEIDVYKFDPWELPEKAEFGENEWYFFTPRDRKYPNGVRPNRAAVSGYWKATGTDKAIYSANKYVGIKKALVFYKGKPPKGVKTDWIMHEYRLSDSKSQTYSKQSGSMRLDDWVLCRIYKKKNLGKTIEMMKVEEEELEAQNIYIYTMYFSDKGIPSR

SEQ ID NO: 220 - protein, 204 aa, Glycine max
MGVPEKDPLSQLSLPPGFRFYPTDEELLVQYLCRKVAGHHFSLPIIAEIDLYKFDPWVLPSKAIFGEKEWYFFSPRDRKYPNGSRPNRVAGSGYWKATGTDKIITTEGRKVGIKKALVFYIGKAPKGTKTNWIMHEYRLLDSSRKNTGTKLDDWVLCRIYKKNSSAQKAVQNGVVPSNEHTQYSNGSSSSSSSQLDDVLDRCSD

SEQ ID NO: 221 - protein, 346 aa, Gossypium hirsutum
MGVPETDPLAQLSLPPGFRFYPTDEELLVQYLCRKVAGHHFSLQIIGEIDLYKFNPWDLPSKALFGEKEWYFFSPRDRKYPNGSRPNRVAGSGYWKATGTDKIITTEGRKVGIKKALVFYVGKAPKGTKTNWIMHEYRLIETSRKSGSSKLDDWVLCRIYKKNSSGQKPLSSVSSREQSTNGSSSSSSSQLDDMLESLPELDDRFFALPRVNSFKTLQNDVKLGFQSLGIGNLDWGSLGGLSSVPELVPSGQTQTQTQSQGITSYGNSNVYVSTMPPTLCQMDVSTNKIGNSVEEEVQSGLRTQRADNSGIFQQNSNVLNSHNFSNSIDPYGFRCPTQSGGFGFRQ

SEQ ID NO: 222 - protein, 1208 aa, Arabidopsis thaliana
GTCAAAAATAAGAAAGAAAGAAAAAAATATGGGTATCCAAGAAACTGACCCGTTAACGCAATTGAGTTTACCACCGGGTTTCCGATTTTACCCGACCGATGAAGAGCTTATGGTTCAATATCTCTGTAGAAAAGCAGCTGGTTACGATTTCTCTCTTCAGCTCATCGCCGAAATAGATCTTTACAAATTCGATCCATGGGTTTTACCAAATAAAGCATTATTTGGAGAAAAAGAATGGTATTTTTTTAGTCCTAGGGATAGAAAATATCCAAACGGGTCAAGACCTAACCGGGTTGCCGGATCGGGTTATTGGAAAGCTACGGGTACGGATAAAATAATCTCGACGGAAGGACAAAGAGTTGGTATTAAAAAAGCTTTGGTGTTTTACATCGGAAAAGCTCCTAAAGGTACTAAAACCAATTGGATCATGCATGAGTATCGTCTCATTGAACCTTCTCGTAGAAACGGAAGCACTAAGTTGGATGATTGGGTTCTATGTCGAATATACAAGAAGCAATCAAGTGCACAAAAACAAGTTTACGATAATGGAATCGCGAATGCTAGAGAATTCAGCAACAACGGTACTTCGTCCACGACGTCGTCTTCTTCTCACTTTGAAGACGTTCTTGATTCGTTTCATCAAGAGATCGACAACAGAAATTTCCAGTTTTCTAACCCAAACCGCATCTCGTCGCTCAGACCGGACTTAACCGAACAGAAAACCGGGTTCCACGGTCTTGCGGATACTTCTAACTTCGATTGGGCTAGTTTTGCCGGTAATGTTGAGCATAATAACTCGGTACCGGAACTCGGAATGAGTCATGTTGTTCCTAATCTCGAGTACAACTGTGGCTACCTGAAGACGGAGGAGGAAGTCGAGAGCAGTCACGGGTTTAATAACTCGGGCGAGTTAGCTCAAAAGGGTTATGGTGTTGACTCGTTTGGGTATTCGGGGCAAGTTGGTGGGTTTGGGTTTATGTGATGATGAAATGCTGACGCAATAAAAATAAGTCGTTAATTTTTGTCCCGTGGCAAATCTTATATGTATTTGAATTTCAATTCTTTTGGGTTAAGAGGGAGACTCATAGATTTAGATGTAGATTTGTAATCTTTCATGCATAGAAAATTTGACGAATAGATTTCGTAACTTTATTTTGTTGCTGTTTGGTTATCTTTGTATTGGTATAAATTTAGTGGATTGAAATTGC

SEQ ID NO: 223 - protein, 317 aa, Arabidopsis thaliana
MGIQETDPLTQLSLPPGFRFYPTDEELMVQYLCRKAAGYDFSLQLIAEIDLYKFDPWVLPNKALFGEKEWYFFSPRDRKYPNGSRPNRVAGSGYWKATGTDKIISTEGQRVGIKKALVFYIGKAPKGTKTNWIMHEYRLIEPSRRNGSTKLDDWVLCRIYKKQSSAQKQVYDNGIANAREFSNNGTSSTTSSSSHFEDVLDSFHQEIDNRNFQFSNPNRISSLRPDLTEQKTGFHGLADTSNFDWASFAGNVEHNNSVPELGMSHVVPNLEYNCGYLKTEEEVESSHGFNNSGELAQKGYGVDSFGYSGQVGGFGFM

SEQ ID NO: 224 - protein, 339 aa, Cicer arietinum
MGIQDKDPLSQLSLPPGFRFYPTDEELLVQYLCRKVAGHHFSLQIIAEIDLYKFDPWVLPSKAIFGEKEWYFFSPRDRKYPNGTRPNRVAGSGYWKATGTDKIITNEGRKVGIKKALVFYVGKAPKGTKTNWIMHEYRLLDSSRNNTGTKLDDWVLCRIYKKNSSAQNAIPNGIVSSREYTQYSNDSSASSSSHLDDVLQSLPEIDDRCFMLPRVNSLRTMQHRQEEDKLNLLNLNNNNLMDWSNPSSILNTEFQEGQNNGMVNYSSCNDLYVPSVSTICHVNTSGTEKKPMEEEVQSGGARTNPGLFERGSNNFTYSNSVDSFGFRYPVQPVGFGFGQ

SEQ ID NO: 225 - protein, 176 aa, Cicer arietinum
MDSGGKPRTAPPSEQLNLPAGFRFHPTDEELVVSYLAIKAESRPFAIPIIAEIDLYKFDPWELPEKALFGEREWYFFSPRDRKYPNGARPNRAAASGYWKATGTDKPILSKGKKVGVKKALVFYKGKAPKGSKTNWIMHEYRLADSSAKAAAAIPAMRKKGSLRLDDWVLCRIYKK

SEQ ID NO: 226 - DNA, 1239 bp, Arabidopsis thaliana
aaaagatcgacgaacataaaaacaaaaacatataatttgggtttttagagttcgaaacttgaaatctttttttttttttggttgctgaggaatcgaagtagaagagtataaatgggtgttagagagaaagatccgttagcccagttgagtttgccaccgggttttagattttatccgacagatgaagagcttcttgttcagtatctatgtcggaaagttgcaggctatcatttctctctccaggtcatcggagacatcgatctctacaagttcgatccttgggatttgccaagtaaggctttgtttggagagaaggaatggtatttctttagcccaagagatcggaaatatccgaacgggtcaagacccaatagagtagccgggtcgggttattggaaagcaacgggtactgacaaaattatcacggcggatggtcgtcgtgtcgggattaaaaaagctctggtcttttacgccggaaaagctcccaaaggcactaaaaccaactggattatgcacgagtatcgcttaatagaacattctcgtagccatggaagctccaagttggatgattgggtgttgtgtcgaatttacaagaaaacatctggatctcagagacaagctgttactccggttcaagcttgtcgtgaagagcatagcacgaatgggtcgtcatcgtcttcttcatcacagcttgacgacgttcttgattcgttcccggagataaaagaccagtcttttaatcttcctcggatgaattcgctcaggacgattcttaacgggaactttgattgggctagcttggcaggtcttaatccaattccagagctagctccgaccaatggattaccgagttacggtggttacgatgcgtttcgagcggcggaaggtgaggcggagagtgggcatgtgaatcggcagcagaactcgagcgggttgactcagagtttcgggtacagctcgagtgggtttggtgtttcgggtcaaacattcgagtttaggcaatgagagagatgtgaagttactgatgggtgaaaaaagtaaaaacaaaacttggagatagtagagtggcaattgatgtaaataatagggatttatatgggcttttaccgattcggtgaggcttaggattccacaaaggaaaaaggctcgactggagactagtttgatccaacttgacggcccgcaaatgtataatgtttctcaatggagaaaaaaataaatggttaccaatatttttac

SEQ ID NO: 227 - protein, 297 aa, Arabidopsis thaliana
MGVREKDPLAQLSLPPGFRFYPTDEELLVQYLCRKVAGYHFSLQVIGDIDLYKFDPWDLPSKALFGEKEWYFFSPRDRKYPNGSRPNRVAGSGYWKATGTDKIITADGRRVGIKKALVFYAGKAPKGTKTNWIMHEYRLIEHSRSHGSSKLDDWVLCRIYKKTSGSQRQAVTPVQACREEHSTNGSSSSSSSQLDDVLDSFPEIKDQSFNLPRMNSLRTILNGNFDWASLAGLNPIPELAPTNGLPSYGGYDAFRAAEGEAESGHVNRQQNSSGLTQSFGYSSSGFGVSGQTFEFRQ

SEQ ID NO: 228 - protein, 300 aa, Brassica napus
  misc_feature (191)..(191): Xaa can be any naturally occurring amino acid
  misc_feature (255)..(255): Xaa can be any naturally occurring amino acid
MGVREKDPLAQLSLPPGFRFYPTDEELLVQYLCRKVAGYHFSLQIIGDIDLYKFDPWDLPSKALFGEKEWYFFSPRDRKYPNGSRPNRVAGSGYWKATGTDKIIMSDGHRVGIKKALVFYAGKAPKGTKTNWIMHEYRLIEHSRSHGSSKLDDWVLCRIYKKTSGSQRQAVASPVQACLEDQSTNMSSSPXSSSQLDDVLDSFPEMKDRSFDLPRMNSLRTILNGNFEWASLAGLNPMPELAPMTYGLSNYGGYXAFQSAESGCRSSQVDQEQNSTELTQSLGYSSSGFGLSGQMYEFRQ

SEQ ID NO: 229 - protein, 383 aa, Aegilops tauschii
MGSSDSSSGSAPPRHQPPPPQQGSAPELPPGFRFHPTDEELVVHYLKKKAAKVPLPVTIIAEVDLYKFDPWELPEKATFGEQEWYFFSPRDRKYPNGARPNRAATSGYWKATGTDKPIMASGCGREKVGVKKALVFYRGKPPKGLKTNWIMHEYRLTDASSSATTSRPPPVTGGSRAASLRLDDWVLCRIYKKINKAAAGDQQRSMECEDSVEDAVTAYPPYATAGMTGAGAHGSNYDSLLHHQDSHEDNFLDGLLTAEDAGLSAGATSLSHLAAAARASPAPTKQFLAPSSSTPFNWLDASTVGILPQARNFPGFNRSRNVGNMSLSSTADMAVDNGGGNAINAMPPFMNHLPVQDGTYHQQHVILGAPLAPEATAAATSAF

SEQ ID NO: 230 - protein, 355 aa, Brassica napus
MIMQNPAMLPPGFRFHPTDEELILHYLRNRAGSSPCPVAIIADVDIYKFDPWDLPSKAAYGDKEWYFFSPRDRKYPNGIRPNRAAGSGYWKATGTDKPIHNSATGESLGVKKALVFYTGRPPKGTKTNWIMHEYRLTSADAQAGNTYRPMKFRNASMRLDDWVLCRIYKKSSHVSPMAVPPLSDHELDEPCAFEENQLYGKSSAGMIMQGGADAFPLQAAAATQRMPRIPSISELLNDYSLAQLLDDGAPAEMARPDQRAALLGHPVVNQFLVNSSGNMSQLAQMGSSAAGEGATGKRKRSEDGGSTGLPSQPAAAAQKPNYSCFGATFHQIGNGLQGSLGLDHQMLLHSNMGMN

SEQ ID NO: 231 - protein, 176 aa, Physcomitrella patens
METTGSLAQLQLPPGFRFHPTDEELVLHYLRRKADSHVFLIPVIAEVDLYKFDPWDLPDKALFGEREWYFFSPRDRKYPNGARPNRAAASGYWKATGTDKPIFMTNSHSKVGVKKALVFYRGKAPKGEKTNWIMHEYRLAEGVSPPARHHRRGSLRLDDWVLCRIYEKCTHAQRAG

SEQ ID NO: 232 - protein, 355 aa, Bambusa emeiensis
MIMPSPAMLPPGFRFHPTDEELILHYLRNRAGSSPCPVAIIADVDIYKFDPWDLPSKAAYGDKEWYFFSPRDRKYPNGIRPNRAAGSGYWKATGTDKPIHNSATGESLGVKKALVFYTGRPPKGNKTNWIMHEYRLASADAQAGNTYRPMKFRNASMRLDDWVLCRIYKKSSHVSPMAVPPRSDHELDEPCAFEENQLYGKSSAGMIMQGGADAFPLQAAAATQRMPRIPSISELLNDYSLAQLLDDGAPAEMARPDQRAALLGHPVVNQFLVNSSGNMSQLAQMGSSAAGEGATGKRKRSEDGGSTGLPSQPAAAAQKPNYSCFGATFHQIGNGLQGSLGLDHQMLLHSNMGMN

SEQ ID NO: 233 - protein, 207 aa, Physcomitrella patens
METGGSISQLQLPPGFRFHPTDEELVLHYLRRKADSHVFQIPVIAEVNLYKFDPWDLPDKALFGEREWYFFSPRDRKYPNGARPNRAAASGYWKATGTDKPIHMTNGHSKVGVKKALVFYRGKAPKGEKTNWIMHEYRLAEGVSPSAHHHRRGSLRLDDWVLCRIYEKCTHAQRAGKEHDRASVEDVLASLPEIDDPNHMLPRLNSM

SEQ ID NO: 234 - protein, 256 aa, Phaseolus vulgaris
MDATTPSELPPGFRFHPTDEELIVYYLCNQATSKPCPASIIPEVDLYKFDPWELPDKTEFGENEWYFFSPRDRKYPNGVRPNRATVSGYWKATGTDKAIYSGSKLVGVKKSLVFYKGRPPKGDKTDWIMHEYRLAESKQPVNRKIGSMRLDDWVLCRIYKKKNTGKTLEHKETHPKVQMTNLIAANNDEQKMMNLPRTWSLTYLLDMNYLGPILSDGSYCSTFDFQISNANIGIDPFVNSQPVEMANNYVSDSGKY

SEQ ID NO: 235 - protein, 189 aa, Selaginella moellendorffii
MELDQHCSTGEQNQQHLSSDQASGSSDQLQLPPGFRFHPTDEELVVHYLSRKLASHSFKPLPIVTEVDLYKFDPWELPQQASFGEKEWYFFSPRDRKYPNGVRPNRAAASGYWKATGTDKMIHSSADGRKIGVKKALVFYKGRAPKGAKSNWIMHEYRLVDPNNKALFARKRGSLRLDDWVLCRIYKKK

SEQ ID NO: 236 - DNA, 831 bp, Arabidopsis thaliana
aggcccatattccattcttacctctctctacctctctatctctctctcctcataatcgatccgtaaactcgccggaggagcagggagattcaataagacgatggctcagagaacggagaaggaagagaccgagttcaaagttctcgaaaccttgacgacaacaacaacgacgttatgtaccaataactgcggcgttacagcgaatcctgcgacgaacaacatgtgtcagaaatgtttcaacgcatctctcgtctcggcggccgcaggtgttgttgaatcaggttcgatcttgaagagatcggctagatctgtcaatcttcgttcgtcaccagctaaagtcgtgattcgtccaagagagatcgatgcggtgaagaagagagatcaacagatcgtaaaccgatgttctggttgtcggaagaaagttgggttgaccggattcaggtgccgatgcggtgagcttttctgctcagagcaccgttactccgatcgtcatgattgtagctacgactacaaaaccgctggtcgtgaggcgatcgctagagaaaatccggtggtcaaggctgcgaaaatggtcaaagtttaaaaaattaaaaattcgatctcaaccgttgaaaaacttgtggtggttcaaaagctccgatcggaagagagattggtcggagagacatggatttgatttggtgatgtgttgtaaaagaagatcagagagattattcctctcctcaaatcaaaatctgaacctcaattttttttttttacgtttttttttcatcttttaatttatatattagtgaatgattattaatattattattgtgtggcttacggatt

SEQ ID NO: 237 - protein, 160 aa, Arabidopsis thaliana
MAQRTEKEETEFKVLETLTTTTTTLCTNNCGVTANPATNNMCQKCFNASLVSAAAGVVESGSILKRSARSVNLRSSPAKVVIRPREIDAVKKRDQQIVNRCSGCRKKVGLTGFRCRCGELFCSEHRYSDRHDCSYDYKTAGREAIARENPVVKAAKMVKV

SEQ ID NO: 238 - DNA, 857 bp, Gossypium hirsutum
atacgcgtctctatgaggcccatattccgtcgccattactgaccgacctttctcgaccccttcaaatcccctctctctctctctctccttaattccaacgccaacgccccctaattttctctccaaccaaacactcattctctccttcctctctatcctccccttcaaatttgttgttttccttttcctccttcgaaatcagctcaaggagatatggctcaaagaaccgaaaaagaagagactgaattcaaagtccctgaaaccctgacgctatgcgttaacaactgcggggttacgggtaatccagccaccaacaacatgtgccagaagtgttttagtgccaccacggccgcaacatcctcctcttcctcttcctcttccaccaacaacaccgctacttccgctaccgacgataaatcctcgagatctacgccgactcgttcacaggacaatcgatccgattccgctccacctacaacagctgcaacaacggcaacagcaacgacgaatagtccgatgaccgcttcaaatcggtctggatacgataccgcggaaaagaagtcggtgaatcgatgttctggttgcagaaaacgcgttgggttgaccgggttccggtgtcgatgcggggagcttttctgttcggaccatcggtactcggatcgacacgattgtagctacgactacaaggcggcgggtcgcgaagccatcgctagagaaaatcccgtggttaaagcagccaagattatcagagtttgagtttttaccaaatggatccaaattaaattaaataaactattcaaaacatttttcgacctgaaaatagcaagttgtggagatctatgctcgatctcaaatgg

SEQ ID NO: 239 - protein, 180 aa, Gossypium hirsutum
MAQRTEKEETEFKVPETLTLCVNNCGVTGNPATNNMCQKCFSATTAATSSSSSSSSTNNTATSATDDKSSRSTPTRSQDNRSDSAPPTTAATTATATTNSPMTASNRSGYDTAEKKSVNRCSGCRKRVGLTGFRCRCGELFCSDHRYSDRHDCSYDYKAAGREAIARENPVVKAAKIIRV

SEQ ID NO: 240 - DNA, 531 bp, Sorghum bicolor
atggcgcagcgcgacaagaaggtggaggagccgacggagctgcgggcgccggagctcacgctgtgcgccaacagctgcggcttcccggggaacccggccaccaacaacctctgccaggcctgcttccaggccgccacggcttcctccgcctcagcctccgtctcgccgccgtcgccttcctcctcgttgtctccgtccccggcggtgttcaagttcgacgagcagcagcacgcgaggccgtctgcgacggcggtgttcgccgaccggcctgcggagcaaccgccggcgccggcgtccgccaggccgatccggacgacgtcgacttcgtcgtcgtcgtccgtcaaccggtgccagagctgccggaagcgcgtcgggctgacggggttccggtgccgctgcggggagctcttctgcggcgcgcaccgctactcggaccgccacgactgctgcttcgactacaaggccgtcggcagggacgccatcgccagggagaaccccgtcgtgcgcgccgccaagatcgtcaggttctga

SEQ ID NO: 241 - protein, 176 aa, Sorghum bicolor
MAQRDKKVEEPTELRAPELTLCANSCGFPGNPATNNLCQACFQAATASSASASVSPPSPSSSLSPSPAVFKFDEQQHARPSATAVFADRPAEQPPAPASARPIRTTSTSSSSSVNRCQSCRKRVGLTGFRCRCGELFCGAHRYSDRHDCCFDYKAVGRDAIARENPVVRAAKIVRF

SEQ ID NO: 242 - DNA, 1133 bp, Panicum virgatum
ttgcctttgcccgctgcgcttgcgcgtccgcggaaggggacgacgacgcgtccccgtctcctccccttccccgataaaaaggccgggcgcctctcgttcattcctcgctcatcgccgatcacaaccgcgccctccccccaatccccgattcgcgagctcgtccgcgcctcccggcctctcctccccacccccacccgccgcccctccgagaagcgaagcgaagctccgggccgcgccaccgcgcaggcaggcacccaaggcagcaggcgcgggttccttccgccaggtgcgcgggtaggcggcggcatggcgcagcgcgacaagaaggaggagcccacggagctccgggcgccggagatcacgctctgcgccaacaactgcggcttcccggggaacccggccacgcagaacctctgccagagctgcttctcggcggccacggcgtcgatgtcgtcgtcgccgacgtcctcctcgtcgtcctccacggccccggcgccggccgcgccgccccagccgaggccggcgccggcggagctggcctcccccgccgacgcggccgtggcggccccggctccggaggccgcgaaggcgccggcgaggacgtcggcgaaccggtgctcgagctgccggaagcgggtggggctgacggggttccggtgccggtgcggcgagctgttctgcggcgcgcaccggtactcggaccggcacggctgcagctacgactacaagggcgccgccagggacgccatcgcccgggagaacccggtggtgcgcgccgccaagatcgttaggttctgatcgacgacggagtcaaaattcctccatccatccacaggatcaagcaagcgaggaagacaaagaggaagcacacatccacggaaatggaaggccttttcccttggtgttactatgctgttcttcgaagcgtttgattttcaatctcctttttctttttacgatttctcaaatggaagaaaaaatgggaggaaaagaggtggacaaggaatagtgtaataataatgggggcaatgaggccgcggcggtggttgagagcaaaaggatcaacgcaatggattgggtgtatgtacctgtcacacgcaagctttgtgcaaaaactattatacatttctatc

SEQ ID NO: 243 - protein, 163 aa, Panicum virgatum
MAQRDKKEEPTELRAPEITLCANNCGFPGNPATQNLCQSCFSAATASMSSSPTSSSSSSTAPAPAAPPQPRPAPAELASPADAAVAAPAPEAAKAPARTSANRCSSCRKRVGLTGFRCRCGELFCGAHRYSDRHGCSYDYKGAARDAIARENPVVRAAKIVRF

SEQ ID NO: 244 - DNA, 609 bp, Brassica napus
atattccattcatttcctttctctctctctcttctctcgcttttatctctctatattctcaattcgtaagctcgccggagaacgtgaaaaacaatatacatggcgcagagaacggagaaggaagagacggagttcaaggtcctcgaaaccttgaccaccaccccaacgctctgctcaaacaactgcggcgttacagcgaatccagcgaccaacaacatgtgtcagaaatgtttcaacgcctccgtcgccgccgccggcgtagactcaacctcgatcttgaagagatcagccagatccgtcaaccttcgatcgacgccagccaaagtcgtgattcgtcccagggagatcgacccggttaagagagatcaacagacgataaaccggtgttccggttgtcgtaagaaggtcggtttgaccgggttcagatgccgatgcggcgatcttttctgcgccgagcaccgttactcggatcgccacgattgcagctacgactacaaaaccgccggacgcgaggcgatcgccagagagaatccggtcgtcaaggcggcgaagatagtcaaagtttaaagtttaattcaaatcgattcaatcgtgaaaacttgtggtggt

SEQ ID NO: 245 - protein, 155 aa, Brassica napus
MAQRTEKEETEFKVLETLTTTPTLCSNNCGVTANPATNNMCQKCFNASVAAAGVDSTSILKRSARSVNLRSTPAKVVIRPREIDPVKRDQQTINRCSGCRKKVGLTGFRCRCGDLFCAEHRYSDRHDCSYDYKTAGREAIARENPVVKAAKIVKV

SEQ ID NO: 246 - protein, 150 aa, Vitis vinifera
MAQKTEKEETEFKVPETLALCVNNCGFTGNPATNNMCQKCFSASASAAAAAAAGALKSSHKVSGGAADARSSSARSPERMDSLVKREVNRCSGCRRKVGLTGFRCRCGDLFCAEHRYTDRHECSYDYKTAGREAIARENPVVKAAKIVRV

SEQ ID NO: 247 - DNA, 802 bp, Glycine max
atagttttccttctttctttctttgtgaaaaaacaaaaagtccaaaccatggctcagaaaaccgagaaagaagaaaccgacttcaaggttcccgaaacgattacgctttgcgttaacaactgcggcgtcaccggaaaccctgctacgaataacatgtgtcagaagtgcttcaccgccttcaccacctctaccgccaccacgtccggcgccggaggtgccggaatagcttctccggctaccagatccggcatctccgcgcgtccactgaagagatcttttcccgaggagccctcgccgccggcggatcctccgtcttcagaccagacgaccccgtcggaggcgaagcgcgtggtgaaccgctgctccggctgcaggaggaaggtcggactcaccggatttcggtgccgatgcggcgagctcttctgcgccgagcaccggtactccgaccgccacgactgcagctacgactacaaagccgccggaagagaagccatcgcgagggagaatccggtgattagagccgcgaagatcgtcaaagtctgaaaaaaaacaaaaaagaaggaaaaaacccgaacggaacggaatctcaaaacgacgtcgttgacggttgacctttcgcgcgatcgggttcaggtcacgggtttcgctttttttcttttcagatttatatatagagagaagaaaaaaaaagtagcagataacaggtttgagagagagagagagagagtgtgaggttttagattgagagagagagcgagagagagagattgttgctgaaaagaagatgaagaagaatttatcc

SEQ ID NO: 248 - protein, 164 aa, Glycine max
MAQKTEKEETDFKVPETITLCVNNCGVTGNPATNNMCQKCFTAFTTSTATTSGAGGAGIASPATRSGISARPLKRSFPEEPSPPADPPSSDQTTPSEAKRVVNRCSGCRRKVGLTGFRCRCGELFCAEHRYSDRHDCSYDYKAAGREAIARENPVIRAAKIVKV

SEQ ID NO: 249 - DNA, 483 bp, Glycine max
atggctcaaagaacagagaaagaagagaccgagtgcaaggtaccagaaaacttgactttatgtatcaataattgtggagttacaggtaatccagcaacaaacaacatgtgtcagaaatgtttcaacgctacaacaaccaacggtgtgtctaccaacgagatcttaaaattcaccagcgagaaatcgttgagatccagcatatctcgctcgccggcgaaggatcatcaaaggcaaccaaaaactgcgtcggataaagaaagatctgacagttcttccgtggcgaagaaagaggtgaacaggtgctcagggtgccgacgaagggtagggttgaccggattccgatgtcgttgcggggagcttttttgctgggagcaccggtactcagatcgacatgattgtagttacgattacaaaactgtaggtcgcgaagctatcgcgagagagaatcctgttgtgaaagctgcaaagattgttagagtttga

SEQ ID NO: 250 - protein, 160 aa, Glycine max
MAQRTEKEETECKVPENLTLCINNCGVTGNPATNNMCQKCFNATTTNGVSTNEILKFTSEKSLRSSISRSPAKDHQRQPKTASDKERSDSSSVAKKEVNRCSGCRRRVGLTGFRCRCGELFCWEHRYSDRHDCSYDYKTVGREAIARENPVVKAAKIVRV

SEQ ID NO: 251 - protein, 188 aa, Solanum lycopersicum
MAQRTEKEETEFKAVPETITLCINNCGVTGNPATNNMCQKCFNATTAATSTSSSSPTGTSVTIPHNFAEKLVRSEKSARFSSLRSSPDRKSDLDRMSQDLKKVGDTMMVKEEDQLKASLPPAKREVNRCSGCRRKVGLTGFRCRCGELFCGEHRYSDRHDCSYDYKTAGREAIARENPVVKAAKIIKV

SEQ ID NO: 252 - DNA, 733 bp, Parthenium argentatum
aaaaaaaacctccccaccccccacacccaacaaaaaaacaaattcaaactaatcattcaatcaaatactaattattcatttcttgcacgccaagatcttgttaaatctcctcacatctatctataatccctacagcttgttattccacaacaattgattttcttcttataatttcaattctaaatcacaacaaaaaaaaaaaaaaatggctcagagaacagaaaaagaagaaacagaattcaaacctgtacctgaaaccctaactctctgcatcaacaactgcggcgtcgtcggagctccggcgacgaataatatgtgtcaaaactgcttcaccgccaccacaacgtcgcatcgaactcgtactagatctagctcgctgacgtcaccgtctcgtcgtgacgtaaccgtagatctggtgttagatccgacggttgtggtgataggtgatgaattgaaggaagctgtggtggtggtgaagaaggaggtgagtcggtgctctggatgcaggaaacgagtcggtttgaccgggtttcggtgtcggtgtggagatctatattgttcggagcatcggtactctgatcggcatgattgtagttatgattataaggctgttggtcgtgaagtgattgctagggataatccggtggttaaggcggctaaaattgtgaggatatgaatttgcgagcgcacgtttgtcttctgtttcgatgtaattttatttgaagattgatgt

SEQ ID NO: 253 - protein, 156 aa, Parthenium argentatum
MAQRTEKEETEFKPVPETLTLCINNCGVVGAPATNNMCQNCFTATTTSHRTRTRSSSLTSPSRRDVTVDLVLDPTVVVIGDELKEAVVVVKKEVSRCSGCRKRVGLTGFRCRCGDLYCSEHRYSDRHDCSYDYKAVGREVIARDNPVVKAAKIVRI

SEQ ID NO: 254 - DNA, 586 bp, Papaver somniferum
atctccaaaacaatcaaaaatctgcaaaaaaaaaaaaaatcatttctcaaattctactcagattcatggctcagagagataaagaagaaacagaaatgaaggtttctgaatccttatcactttgcatcaacaactgtggtttctcaggtaatccggctaccaagaacatgtgtcaaagttgttacaaaatttctaccgggattatgacacaaccggctctgacgttttccggcaaagaaaaggctagatctagctttctgaggttgccggagcgatcggattatcaacgacgagatctgattacgcaggatgataagaaaggaattgatgatgatcaagcgaagaatgattcgacgacaattaagattgttgagaagaagcaagaggtgaatcggtgttcaggttgccggaggaaagtaggattgaccggatttagatgtcggtgcggtgatatgttctgttcggaacatagatattccgatcgacatgactgtagttttgattataaagctgctggtagagagagtattgctcgccagaatcctgtcgttaaagctgctaagattattagactctaaattaatgt

SEQ ID NO: 255 - protein, 170 aa, Papaver somniferum
MAQRDKEETEMKVSESLSLCINNCGFSGNPATKNMCQSCYKISTGIMTQPALTFSGKEKARSSFLRLPERSDYQRRDLITQDDKKGIDDDQAKNDSTTIKIVEKKQEVNRCSGCRRKVGLTGFRCRCGDMFCSEHRYSDRHDCSFDYKAAGRESIARQNPVVKAAKIIRL

SEQ ID NO: 256 - DNA, 753 bp, Musa acuminata
agagttgtatttcttcacgccctcacgattcacagatccggataccaaatcttagaacgagaaggtgaaaagggtaggaatcgatggctcagcgtgagaaggaggaggcgaagctccacgcccccgagaccctcaccctctgcgtcaacaactgcggcttccccggcaaccccgccaccaacaacatgtgccagtcctgcttccaagcttccaccatcgctgcctcccccgctccccactcctgctctccaagatccgctctcccgatccgatcgccggaacgagcggcagaggagcgggacgcgaggacctccgaggcccccgcggcggctgtgtctgccccggcgccggcgcgacaggtgagccggtgcttctcctgccggaagcgtgtggggctcacggggttccggtgccgctgcggcgatctgttctgcggcgagcaccgctactccgatcgccacgactgcagctacgactacaaggccgccgcccgggtcgccatcgctcgcgcgaatcccgtcgtccgagcggccaagatcgtcagggtgtgaagcgaagaaccggggagacgcgtgtgtgtcttgctttccgatctcggaacatcaagttctaaaacggcggaagggaaagcagcaaactgactcatgctttctgctgtgtgtcatcaagaatctggaaatttccccttcctctcttccgtgtgattcggttgtgatttgtttttctttcccagctttgtttctttcatcatgt

SEQ ID NO: 257 - protein, 155 aa, Musa acuminata
MAQREKEEAKLHAPETLTLCVNNCGFPGNPATNNMCQSCFQASTIAASPAPHSCSPRSALPIRSPERAAEERDARTSEAPAAAVSAPAPARQVSRCFSCRKRVGLTGFRCRCGDLFCGEHRYSDRHDCSYDYKAAARVAIARANPVVRAAKIVRV

SEQ ID NO: 258 - protein, 165 aa, Phyllostachys praecox
MAQRDKKEEPTELRAPEITLCANGCGFPGNPATQNLCQNCFSAASASTSSPPSPSSSSSSSSSSSLPGLSPVVDKPRPAPVELASPAVDRAPAVEVKAGKTSVNRCSSCRKRVGLTGFRCRCGELFCGEHRYSDRHGCSYDYKAATRDAIARDNPVVRAAKIVRF

SEQ ID NO: 259 - protein, 164 aa, Oryza sativa
MAQRDKKDQEPTELRAPEITLCANSCGFPGNPATQNLCQNCFLAATAFTSSPSSLSSPVLDKQPPRPAAPLVEPQAPLPPPVEEMASALATAPAPVAKTSAVNRCSRCRKRVGLTGFRCRCGHLFCGEHRYSDRHGCSYDYKSAARDAIARDNPVVRAAKIVRF

SEQ ID NO: 260 - DNA, 476 bp, Brassica napus
  misc_feature (471)..(471): n is a, c, g, or t
acattccattcatttcctctctctctctctctctctcctctgattctctctatacgacccgtgagctcgccggaggagggtgaaaccaataaagatggcgcagaggacggagaaggaagagacggagttcaaggtcctcgaatccctgacgacccccgccaccgccacgaccacgctctgctcaaataactgcggcgtyacagcgaatccagccaccaacaacatgtgtcagaaatgtttcaacgcttccatcgccgccgccggcgtagactccggttcgacgttgaagagagcgtcgagatccgtcaatcttaggcccacgccagccaaagtcgtgatccgtcccagggagatcgatccggttaagagagatcagcagacggtaaaccggtgttccggttgtcggaagaaggtcgggctgaccgggttcagatgccgatgcggtaaccttttctgctccgagcaccgttnctccg

SEQ ID NO: 261 - protein, 127 aa, Brassica napus
  misc_feature (35)..(35): Xaa can be any naturally occurring amino acid
  misc_feature (126)..(126): Xaa can be any naturally occurring amino acid
MAQRTEKEETEFKVLESLTTPATATTTLCSNNCGXTANPATNNMCQKCFNASIAAAGVDSGSTLKRASRSVNLRPTPAKVVIRPREIDPVKRDQQTVNRCSGCRKKVGLTGFRCRCGNLFCSEHRXS

SEQ ID NO: 262 - DNA, 437 bp, Brassica napus
atatttcccattcatttcctctctcttctctctcaacaccattcgcaagctcgccggagaaaatcaacaacgcagatggcgcagagaacagagaaggaagagacggagttcaaggtcctcgaaaccttgacgacgacaacaaccccgacgctctgctccaacaactgcggcgtcacagcgagtccatcaaccaacaacatgtgccagaaatgtttcaacgccggtatagatccaactccgatcgcaaaaagatcagccagatccgtcagtctccggtcaacgccagccaaagctgcgatccgtcccagggagaccgatccggtcaagagagaccaccatcaacagaccgtaaaccgatgctccggttgtcggaagaaagtcgggttgaccggattcagatgccgatgcggcgatcttttctgcgcggagcacgctac

SEQ ID NO: 263 - protein, 120 aa, Brassica napus
MAQRTEKEETEFKVLETLTTTTTPTLCSNNCGVTASPSTNNMCQKCFNAGIDPTPIAKRSARSVSLRSTPAKAAIRPRETDPVKRDHHQQTVNRCSGCRKKVGLTGFRCRCGDLFCAEHA

SEQ ID NO: 264 - DNA, 444 bp, Brassica napus
ctctctctctcctctcctctcctctcctctcctctcctctctcaatacgatttgtaagctcgccggagtaaatcaacaacacagatggcgcagagaactgaaaaggaagagacagagttcaaggccctcgaaaccttgacgacgacaacaaccccgacgctctgctccaacaactgcggcgtcacagcgtgtccatcaaccaacaacatgtgccagaaatgtttcaacgccgccgccgccggtatagatccaaatccgatcgtaaaaagatcagccagatccgtcagtctccggtcaacgccagccaaagccgcgatccgtcccagggagaccgatccggtcaagagagaccatcatcaacagaccgtaaaccgatgctccggttgtcggaagaatgtcgggttgaccggattcagatgccgatgcggcgaccttttctgcgcg

SEQ ID NO: 265 - protein, 120 aa, Brassica napus
MAQRTEKEETEFKALETLTTTTTPTLCSNNCGVTACPSTNNMCQKCFNAAAAGIDPNPIVKRSARSVSLRSTPAKAAIRPRETDPVKRDHHQQTVNRCSGCRKNVGLTGFRCRCGDLFCA

SEQ ID NO: 266 - DNA, 949 bp, Gossypium hirsutum
aacgccccctaattttctctccaaccaaacactcattctctccttcctctctatcctccccttcaaatttgttgttttccttttcctccttcgaaatcagctcaaggagatatggctcaaagaaccgaaaaagaagagactgaattcaaagtccctgaaaccctgacgctatgcgttaacaactgcggggttacgggtaatccagccaccaacaacaccgctacttccgctaccgacgataaatcctcgagatctacgccgactcgttcacaggacaatcgatccgattccgctccacctacaacagctgcaacaacggcaacagcaacaacgaatagtccgatgaccgcttcaaatcggtctggatacgataccgcggaaaagaagtcggtgaatcgatgttctggttgcagaaaacgcgttgggttgaccgggttccggtgtcgatgcggggagcttttctgttcggaccatcggtactcggatcgacacgattgtagctacgactacaaggcggcgggtcgcgaagccatcgctagagaaaatcccgtggttaaagcagccaagattatcagagtttgagtttttaccaaatggatccaaattaaattaaataaactattcaaaacatttttcgacctgaaaatagcaagttgtggagatctatgctcgatctcaaaaggaaaaaaaaagtaaaaaaagactgtttcagagagggagaaatgagtcggtcgaaatcttgattacaaaaattcctggagatgaacaagatattctctcctctgattcttctggttggatcaaatctatagtattttcagtttactttttattattaatttagaaatgaaagattatcgagatttattagttgcagttgatatgtgttacggttactagaccccttccatgatcgagatcttatatatcgaggctttggtttagattg

SEQ ID NO: 267 - protein, 156 aa, Gossypium hirsutum
MAQRTEKEETEFKVPETLTLCVNNCGVTGNPATNNTATSATDDKSSRSTPTRSQDNRSDSAPPTTAATTATATTNSPMTASNRSGYDTAEKKSVNRCSGCRKRVGLTGFRCRCGELFCSDHRYSDRHDCSYDYKAAGREAIARENPVVKAAKIIRV

SEQ ID NO: 268 - DNA, 699 bp, Gossypium hirsutum
gaaaaaaaaaaaaaaaaaaaaaaaaaaaaaaaaaaaaaaaaaaaaaaaaaaaaaaaaaaaaacgccccctaattttctctccaaccaaacactaattctctccttcctctccatcctccccttcaaatttgttgttttccttttcctccttcaaaatcacctcaaggaaatatggctcaaaaaaccaaaaaaaaaaaaactgaattcaaagtacctgaaaccctgactctatgcgttaacaactggggggttacgggaaatccacccaccaacaacatgggccaaaaatgttttagttccaccacggccgccacatcctcctcttcctcttccaccaacaacaccgctacttccgctaccaacaaaaaatcctcaaaatctaccccaactcgttcacaggacaaccgatccaactccgctccgcctacaacagctgcaacaacggcaacagcaacagcaacaacaaatagtccaatgactgcttcaaatcggtctggatacaataccgcgaaaaaaaagtcggtgaatcgatgttctggttgcaaaaaacgcgttgggttgacggggttccggtgtcaatgcggggagcttttctgttcggaccatcggtactcgaatcgacacaattgtagctacaactacaaggcggcgggtcgcgaagccatcgctagggaaaatcccgtggttaaagcacccaaa

SEQ ID NO: 269 - protein, 176 aa, Gossypium hirsutum
MAQKTKKKKTEFKVPETLTLCVNNWGVTGNPPTNNMGQKCFSSTTAATSSSSSSTNNTATSATNKKSSKSTPTRSQDNRSNSAPPTTAATTATATATTNSPMTASNRSGYNTAKKKSVNRCSGCKKRVGLTGFRCQCGELFCSDHRYSNRHNCSYNYKAAGREAIARENPVVKAPK

SEQ ID NO: 270 - DNA, 1064 bp, Zea mays
ctcgcccgctcgctccgcgctccctccccccctcccgcgcggatcacagacaggctcacggtcacggccggcctcccaattcgcaacctcgcctccgcctctcctcctacccctccgaaaaagcaagctccggccgggccgccaccaccaccaccgcgcgcgcgtgcacgcgctcccacacacagacagacagacagacagacagagtgagagacgcacggtggttcggggtctcccttctgccaggcgcacgaggagccatggcgcagcgcgacaagaaggaggagcccacggagctccgggcgccggagatcacgctgtgcgccaacaactgcgggttcccgggtaacccggccacgcagaacctgtgccagagctgcttctcggcgtcgaggtcgccgtcgtcccctacctcctcctcctcttccctggcgtccgcggcgtcgcagccgaggccagcagcgctcgtcgtagacgcggcagcggtggaggcgctggccgctccggcggccgcggccgtgggccaggctacggaagccgcggcgagggcgtccgcgagccggtgctccagctgccggaagcgcgtggggctgacggggttccggtgccgctgcggcgagctcttctgcggcgcgcaccggtactcggaccggcacggctgcagctacgactacaggggcgccgcccgggacgccatcgcccgggagaacccggtggtgcgcgcggccaaggtcgttaggttctgatgacgggaaggaaggaaggacacagcacaaaggctcgcagggcggagaaggggaggaggaaggcgtgcggacaaggtcttcggtgttattattattacgctgttcctttgattttaatctcctttttttttaaaaaaatatttgtcctatgggaatgggattgggagaagaggtggacgaagaatagtggagtaataataatggtggtggtgcagtggcggtggttgagggcccgaaacgatgaacagatgggttggattgggttgggtgtatgtatgtgtcacacgcaactttggacagaactattatactagtact

SEQ ID NO: 271 - protein, 161 aa, Zea mays
MAQRDKKEEPTELRAPEITLCANNCGFPGNPATQNLCQSCFSASRSPSSPTSSSSSLASAASQPRPAALVVDAAAVEALAAPAAAAVGQATEAAARASASRCSSCRKRVGLTGFRCRCGELFCGAHRYSDRHGCSYDYRGAARDAIARENPVVRAAKVVRF

SEQ ID NO: 272 - DNA, 798 bp, Sorghum bicolor
atggcgcagcgcgacaagaaggaggagcccacggagctccgggcgccggagatcacgctgtgcgccaacaactgcggcttcccggggaacccggccacgcagaacctgtgccagagctgcttctcggcggccacggcgtcgaggtcgtcgtcgccgtcgtcccctacctcctcttcctcagcttcagcggtgtcgcagccgaggccggcggcactcgtagacgcagcagcggtggagctgctggcctctgcggatgccgcagccgtgggccagtctatggaggtcgtcgccgccgctccggcggccacggcggcgaggtcgtctgctgtgaaccggtgctccagctgccggaagcgggtggggctgacggggttccggtgccggtgcggcgagctcttctgcggcgcgcaccggtactcggaccggcacggctgcagctacgactacaagggcgccggcagggacgccatcgcccgggagaacccggtggtggcccaaaacgatgaacaaatgggttgggttgggttgggttgggttgggtgtatgtatctgtcacacgcaactttgtgcaaaaactattatactacgagtacgtttctcgtctctctcgtacagaaaacaccagcacgagcgatgattggtcaatcattcgtcaggcaggctcgtatactagtaatcatctctgccgatcccggaagtattttttacagactttttcagaccgaaagattgagaagcgatcaactcctctttccgcagaagaattatgcccccgtgtgtggcccacctgctccataa

SEQ ID NO: 273 - protein, 265 aa, Sorghum bicolor
MAQRDKKEEPTELRAPEITLCANNCGFPGNPATQNLCQSCFSAATASRSSSPSSPTSSSSASAVSQPRPAALVDAAAVELLASADAAAVGQSMEVVAAAPAATAARSSAVNRCSSCRKRVGLTGFRCRCGELFCGAHRYSDRHGCSYDYKGAGRDAIARENPVVAQNDEQMGWVGLGWVGCMYLSHATLCKNYYTTSTFLVSLVQKTPARAMIGQSFVRQARILVIISADPGSIFYRLFQTERLRSDQLLFPQKNYAPVCGPPAP

SEQ ID NO: 274 - protein, 164 aa, Oryza sativa
MAQGDKKDQEPTELRAPEITLCANSCGFPGNPATQNLCQNCFLAATASTSSPSSLSSPVLDKQPPRPAAPLVEPQAPLPPPVEEMASALATAPAPVAKTSAVNRCSRCRKRVGLTGFRCRCGHLFCGEHRYSDRHGCSYDYKSAARDAIARDNPVVRAAKIVRF

SEQ ID NO: 275 - DNA, 683 bp, Gossypium hirsutum
atacgcgtctctatgaggcccatattccgtcgccattactgaccgacctttctcgaccccttcaaatcccctctctctctctctctccttaattccaacgccaacgccccctaattttctctccaaccaaacactaattctctccttcctctccatcctccccttcaaatttgttgttttccttttcctccttcgaaatcacctcaaggagatatggctcaaagaaccgaaaaagaagagactgaattcaaagtacctgaaaccctgactctatgcgttaacaactgcggggttacggggaatccagccaccaacaacatgtgccagaaatgttttagttccaccacggccgccacatcctcctcttcctcttccaccaacaacaccgctacttccgctaccgacgataaatcctcgagatctacgccgactcgttcacaggacaaccgatccgactccgctccgcctacaacagctgcaacaacggcaacagcaacagcaacgacgaatagtccgatgactgcttcaaatcggtctggatacgataccgcggaaaagaagtcggtgaatcgatgttctggttgcagaaaacgcgttgggttgacggggttccggtgtcgatgcggggagcttttctgttcggaccatcggtactcggatcgacacgattgtagctacgacta

SEQ ID NO: 276 - protein, 156 aa, Gossypium hirsutum
MAQRTEKEETEFKVPETLTLCVNNCGVTGNPATNNMCQKCFSSTTAATSSSSSSTNNTATSATDDKSSRSTPTRSQDNRSDSAPPTTAATTATATATTNSPMTASNRSGYDTAEKKSVNRCSGCRKRVGLTGFRCRCGELFCSDHRYSDRHDCSYD

SEQ ID NO: 277 - DNA, 1100 bp, Panicum virgatum
cccccccaaacccatttccttcctgcctccacgacccagcccaggcccggcggtgcctctccctctcgtctccggatcggcaagagcccagctgctgccggattcacacgacacctcgtcgtctctctctctctctctctctctctctctctctctctctctctctctctctcggcccatggcgcagcgcgacaagaaggtggaggagccgacggagctgcacgcgccggagctcacgctctgcgccaacagctgcggcttcccgggcaacccggcgaccaagaacctctgccagaactgcttcctggccgcctcggcctccgtgtcgccgccgtcgccctcctcctcctcctcgtcgccctcgccggcggtgttcgacaagccgcggccggcggtcgcccctaccgccgtgtggccgccgttccccgcggccgccgaccggcccccggcgggccccgcggagtccccctccaaggcgccccggacgtcgtcgtcggtcaaccggtgccacagctgccggaagcgggtcgggctgacggggttccggtgccgctgcggcgagctcttctgcggcgcgcaccggtactcggaccgccacgactgcggctacgactacaagggcgttgcccgggacgccatcgcccgggagaaccccgtcgtgcgcgccgccaagatcgtcaggttctgagagctggggagcaccggaggagaccacgcagctcagctccacgccgatcgtcgatccatctcccgcgctccggaatccccctctctgtttttctcttttctttcctttttacaaaagtttaaaaaggtgattagtcgaggtgctatcatcatgctgttcttgagaattccacaaagaagaagaagaagatgatgatgatcaaggaaaaaggaggagcggatcatggcaaatcatgatgaaggaaaaagggaatcgagagcacagtgcgatgataatgttgtagcggtggttgggggtggagataggggtcggtttggtgtgttgtcctactacaaatcacaatcttctattaaatttttcttccatctctctctgtataaactaaattataattggaatctccctattgccc

SEQ ID NO: 278 - protein, 169 aa, Panicum virgatum
MAQRDKKVEEPTELHAPELTLCANSCGFPGNPATKNLCQNCFLAASASVSPPSPSSSSSSPSPAVFDKPRPAVAPTAVWPPFPAAADRPPAGPAESPSKAPRTSSSVNRCHSCRKRVGLTGFRCRCGELFCGAHRYSDRHDCGYDYKGVARDAIARENPVVRAAKIVRF

SEQ ID NO: 279 - DNA, 824 bp, Panicum virgatum
gaacggggcggagcgacttcagaagaggtcgacccgcaccccttgcaggttgagaatcccaagctcccacccgcagtccgcagacacgctccgccgcttcgccccaattcccaaccaccaccaccttcacttcacctcgaccgaaccgatggagcagcaagggagcgagaacacgcaggagccgctcccctgcgccaacaactgcggtttcttcggctccccggccacgcgcaacctctgctccaagtgcttccgcgacagcctccgccacgccgaggcccaggcggtggcggcgacagcgacagcgacggccgcgctcgccgcctcttcttctccggccgcggcgtcagcggatcccgacgcggcgacagcggcagcgacggaggaggcggggaaggcgcgagcgaaggggaagaagagcggccggtgcgcggcgtgcgggaggaaggtggggctgatggggttcgagtgccggtgcggcggcgtcttctgcggcgcgcaccgctactcggaccggcacgactgcggctacgactacaggggcgccggccgcgacgccatcgcccgcgccaaccccgtcgtcagggccgacaagcaggtcgacaagctctgaccgagcagcgccggcgcgtgctctgctctcaggcagcaaaccatcactggcctggcctggctgctcgatcgaagattcgaagtatgcagtatgcttgattgaagtctagtcgattgcaattcgcgtcaacatctctgtacctcttcgctagttcatgatgtatatttgctatacctacctgctgctagtgcagttgcttgttaacagacag

SEQ ID NO: 280 - protein, 154 aa, Panicum virgatum
MEQQGSENTQEPLPCANNCGFFGSPATRNLCSKCFRDSLRHAEAQAVAATATATAALAASSSPAAASADPDAATAAATEEAGKARAKGKKSGRCAACGRKVGLMGFECRCGGVFCGAHRYSDRHDCGYDYRGAGRDAIARANPVVRADKQVDKL

SEQ ID NO: 281 - protein, 213 aa, Oryza sativa
MGGIPFENGSSPIRQGSSSQLLLPLGDQMQWSFISTILCDLEPYWQVQLVFLTMAQESWKKEAEETGVHTPEAPILCVNNCGFFGSRMTENMCSKCYRDTVKAKTVATVVEKKPLASLSSTPLVAEVTDGGSGSVADGKQVMEEDTPKPPSNRCLSCRKKVGLTGFKCRCGGTFCSMHRYADSHKCTFDYKQAGREQIAKQNPLVKADKITKI

SEQ ID NO: 282 - DNA, 915 bp, Panicum virgatum
ctcccgacgctcgacccgaaaaaaaatattctccgcggggggtaagggaaaggtcgcgtggcgtctcgcccacagtccatcggtagcaatggcacaagagagctggaaacaagagtccgaggagactagagtccacgcgcctgaggcccctattctctgcataaacaactgtggtttctttggcagcagcatgacgaacaatatgtgctcgaagtgctatagggacttcatcaagttgatggaagctcctgtggtggagaagaaggtgaccacatcagcatcttcttccacagcaccactggagacaaagcgagatgatgcgcctgccgctgctgccactgaagctgtggctgagaagcaagcagagcaagagcccccaaagccacccagcaaccggtgtctgacttgccgcaagaaggtcgggctgaccggcttcctctgccgttgcgggggcaccttctgctccacgcaccgctacaccgactcccaccagtgcacctttgactataagaaggtggcacgggagcagatagccaagcagaatccagttgtgatggccgagaagataaacaagatctaatgaatggttgtgaagggattcatgcctgggttcctgagtcctcaagttcactataatcgataggttccttcgggtggtggtctgggttagcgtggtagtagggggtctcaattgtgtctatccttctcctttatcatggttccattctctgccggaaagatgcagtggttttgcgtcgtcacttcctctggaagtagtttaagtcgagaagataagattgcacatcaggtattgcttattctggtcctggagggccaagtgttgtatcgacatgtcattggttttgtatcgttgtatgttatcacgtgtgctggaaatcacagcaagtatgaagt

SEQ ID NO: 283 - protein, 163 aa, Panicum virgatum
MAQESWKQESEETRVHAPEAPILCINNCGFFGSSMTNNMCSKCYRDFIKLMEAPVVEKKVTTSASSSTAPLETKRDDAPAAAATEAVAEKQAEQEPPKPPSNRCLTCRKKVGLTGFLCRCGGTFCSTHRYTDSHQCTFDYKKVAREQIAKQNPVVMAEKINKI

SEQ ID NO: 284 - protein, 233 aa, Zea mays
MVSSPFDLKIWGFGSASRARSGPSSFFPLLYLIGFFASFTQGSSERNRKEGRLIRVKEAMEHKEAGCQAPEGPILCINNCGFFGSAATMNMCSKCHKEMITKQDQAKLAASSIDSIVDGSDAVMEPGGAGSNTVVAVAQVELQKKNVQQPADVAEPNEGVAAISKGGKVGPNRCSACRKRVGLTGFNCRCGNLYCALHRYSDKHDCKFDYRTAARDAIAKANPVVKADKLDKI

SEQ ID NO: 285 - protein, 213 aa, Oryza sativa
MGGIPFENGSSPIRQGSSSQLLLPLGDQMQWSFISTILCDLEPYWQVQLVFLTMAQESWKKEAEETGVHTPEAPILCVNNCGFFGSRMTENMCSKCYRDTVKAKTVATVVEKKPLASLSSTPLVTEVTDGGSGSVADGKQVMEEDTPKPPSNRCLSCRKKVGLTGFKCRCGGTFCSMHRYADSHKCTFDYKQVGREQIAKQNPLVKADKITKI

SEQ ID NO: 286 - DNA, 820 bp, Panicum virgatum
gccctcgccctcgccttcgccttcgcctacctctcgacgcccaaccccaaaaagaaaaattctcctcgcggagaaaggtcgcgtgccgtctcgcccacagcccatctgtaacaatggcacaggagagctggaaacaggaatctgaggagactggagtccatgcacctgaggccccaattctgtgcataaacaactgtggtttcttcggcagcagcatgacgaacaatatgtgctcgaagtgctacagggacttcatcaaattgatggaaggccctgtggttgagaagaaggtgatcacggtggcatcttcttctgcggcaccaatggagacagcaaagcaagatgatgtgcctgcagctgctgccactgaagctgtgacggagaagcaagcagagcaggagccgccaaagccgcccagcaaccggtgccttacctgccgcaagaaggttgggctgactggcttcctctgccgctgcgggggcaccttctgctccatgcaccgctacactgactcccaccagtgcaccttcgactacaagaaggtggcacgggagcagattgccaagcaaaatccagttgtgatggcagagaagattaacaagatatgatgcatggtcatgtgaagggatcactaaattcatgcctgggtagtgggttcactccaaatgataggttccttcaggcggtggtctgggtctgggttagagtggtagctggtctcaattgtgtctatcctcctcctttatcatggtttcattctctcgattgtgtaataatgtaaatatattcaaactgtaatttaatcctattgcttcctact

SEQ ID NO: 287 - protein, 164 aa, Panicum virgatum
MAQESWKQESEETGVHAPEAPILCINNCGFFGSSMTNNMCSKCYRDFIKLMEGPVVEKKVITVASSSAAPMETAKQDDVPAAAATEAVTEKQAEQEPPKPPSNRCLTCRKKVGLTGFLCRCGGTFCSMHRYTDSHQCTFDYKKVAREQIAKQNPVVMAEKINKI

SEQ ID NO: 288 - protein, 173 aa, Arabidopsis thaliana
MDHDKTGCQSPPEGPKLCTNNCGFFGSAATMNMCSKCHKDMLFQQEQGAKFASAVSGTSSSSNIIKETFTAALVDIETKSVEPMTVSVQPSSVQVVAEVVAPEEAAKPKGPSRCTTCNKRVGLTGFKCRCGSLFCGTHRYADVHDCSFNYHAAAQEAIAKANPVVKAEKLDKI

SEQ ID NO: 289 - DNA, 965 bp, Panicum virgatum
cctggcccgacgacgcccccatttcgaggctcctccttgcgattccaatccccgcccgcctcctccgcctccgcgtccgcctcgcgcagggtttggcttatagtagtcatggaacacaaggagacgggctgccagcaaccggagggcccaatactatgcatcaacaactgtggcttctttggcagtgcggccaccatgaacatgtgctccaagtgccacaaggagatgataatgaagcaggagcattcccagctggctgcctcctccattgatagcattgtcaatggcggtgatggtgggaaaggccctatcatagctgcaaccgcagaggtggcggttgctcaagttgaggagaagactattgttgtgcagcctccatttgtagctgaaaccagcgaggctgctgccattatccccaaggccaaggaaggtccgaaccggtgcgcaacctgtaggaagcgggttggtctgacgggattcaactgccgatgcggtaacatgtactgtgcgttgcaccgctactccgacaaacatgactgccagtttgactaccagactgcagctagggatgcgattgccaaggccaatcctgtggtgaaggcggagaagcttgaaaagatctgaagggggcaatggggaacgaaatgggttgcgatctgcaagattcaatcatgcatctttgctgctttatcattgaacatcccattcttgtttgctgccacatccctgagtcgttcaacactatgatgctcacgcatcctggcagctgcaagaagtcatcctcagtcgagtccaaaatggtttgcgtgttggctatgttgtgtaagcttattcagttattcatggtggtttcagtcggtattgtggcatttccatttaggtagctctgtaatgtactactgtctcatgcgtgttacattccaatcagtaatagtaatcagcaatggtctgcaatatttcctctt

SEQ ID NO: 290 - protein, 171 aa, Panicum virgatum
MEHKETGCQQPEGPILCINNCGFFGSAATMNMCSKCHKEMIMKQEHSQLAASSIDSIVNGGDGGKGPIIAATAEVAVAQVEEKTIVVQPPFVAETSEAAAIIPKAKEGPNRCATCRKRVGLTGFNCRCGNMYCALHRYSDKHDCQFDYQTAARDAIAKANPVVKAEKLEKI

SEQ ID NO: 291 - DNA, 519 bp, Sorghum bicolor
atggcacaagagagctggaaacaagagtctgaggaaactggagtccatgcccctgaggccccgattctgtgcataaacaattgtggtttcttcggcagcagcatgacaaacaatatgtgctcgaagtgctatagggacttcatcaagttgatggaaacccctgtggtggagaagaaggttatagcaggggcatcatcctctgcagtgctgccactagaggcagcaaagcgagacgcattgcccaccgctgctgctgctgctgctgctgaagcagccgcagctgtagacgacaagcaagcagcacaggaggagcccccaaagccgccgagcaaccggtgcctgacgtgccgcaagaaggtggggctgactgggttccagtgccgctgcggtggaaccttctgctccatgcaccgctacacggactcccaccagtgcaccttcgactacaagacagcggccagggagcagatcgccaagcagaaccctgtcgtgatggccgagaagatcaacaagatctga

SEQ ID NO: 292 - protein, 172 aa, Sorghum bicolor
MAQESWKQESEETGVHAPEAPILCINNCGFFGSSMTNNMCSKCYRDFIKLMETPVVEKKVIAGASSSAVLPLEAAKRDALPTAAAAAAAEAAAAVDDKQAAQEEPPKPPSNRCLTCRKKVGLTGFQCRCGGTFCSMHRYTDSHQCTFDYKTAAREQIAKQNPVVMAEKINKI

SEQ ID NO: 293 - protein, 173 aa, Arabidopsis thaliana
MDHDKTGCQSPPEGPKLCTNNCGFFGSAATMNMCSKCHKDMLFQQEQGTKFASAVSGTSSSSNIIKETFTAALVDIETKSVEPMTVSVQPSSVQVVAEVVAPEEAAKPKGPSRCTTCNKRVGLTGFKCRCGSLFCGTHRYADVHDCSFNYHAAAQEAIAKANPVVKAEKLDKI

SEQ ID NO: 294 - protein, 173 aa, Camellia sinensis
MEQNETGCQVPPDAPMLCVNNCGFFGSAATMNPCSKCHKDLMLKQQQTELAASSIGSIANGGSGSPGKEPDSAITTVHVDAGSSDSMIVSMQASHESLLNENNVIVKEVPPNRCSACRKRVGLTGFNCRCGNLFCAVHRYSDKHDCPFDYRSAAQDAIAKANPVVKAEKLDKL

SEQ ID NO: 295 - DNA, 972 bp, Gossypium hirsutum
ttttctgctatcagtttcattacataatatatctcttcgattaaagaatcgctgggttcgattttgtcagacaagatcggccaaattaagatttcaggagattagagaagatggaccctcatgatgagacgggccgccaagcttcagaaggccccatcctgtgtgttaataactgtggtttctttggaagtgcggcgaccatgaatatgtgctccaaatgtcacaaggcaatgatcctgaagcaggaacaggcacaactcgtagcatcatccatcgatagcattgttaatggcagcactagcgggaatggtaaggaaccatctgttgctgctgctttggctgtgcaatgtggaaattttgggtcaaaaattgaatcatccatcgatccatcccatatgaccttcggtgggatgaaaacaaaagagggtcccaacaggtgtaatgcatgccacaagcgtgttggtttgacaggatttagctgcaggtgtggaaacatcttctgtgcagcacataggtactctgacaaacacaactgtcctttcgattataggacagctgcccgcgatgctattgctaaagccaacccggtagtgagggctgagaaacttgataaaatctaaaaagagtcgaggatgaagatgaaggtgaaggtgaagaattgtgtaatgaagtatggggtttatggtcctacccattgtgtcgtcagctcatcatagtgaaggtttatttaaagttgggtgctttgtctcattaggtgtcccctttgatttgatataaaaaacaagttggaaagtggatagggaggacaccattgcagtgtaaggaaagtctatattccttgtcaatttgttggcgatacatttaagttcgcccctgtttgtaagtctttgtttgtgctggtttgatggaacaatcgatatgatcgccttgtaatgcttcttttcatatgcacttctttcttctagtagcacc

SEQ ID NO: 296 - protein, 169 aa, Gossypium hirsutum
MDPHDETGRQASEGPILCVNNCGFFGSAATMNMCSKCHKAMILKQEQAQLVASSIDSIVNGSTSGNGKEPSVAAALAVQCGNFGSKIESSIDPSHMTFGGMKTKEGPNRCNACHKRVGLTGFSCRCGNIFCAAHRYSDKHNCPFDYRTAARDAIAKANPVVRAEKLDKI

SEQ ID NO: 297 - DNA, 1006 bp, Gossypium hirsutum
atttttaaaaaaatcctcctaaaaaagaaaaagaaaaaatcacccgcaatttctctttctcctatcagtttcgttacataatatatctcttcgattaaagaatcgctgggttcgattttgtcagacaagatcggccaaattaagatatcagagaagatggaccctcttgatgagacaggccgccaagcttcagaaggccccatcctgtgtgttaataactgtggtttctttggaagtgcggctaccatgaatatgtgctccaaatgtcacaaggcaatgatcctgaagcaggaacaggcacaactcgtagcatcatccatcgatagcattgttaatggcagcactagcgggaatggtaaggaaccatctgttgctgctgctttggctgtgcaatgtggaaattttgggtcaaaaattgaatcatccatcgatccatcccatatgaccttcggtgggatgaaaacaaaagagggtcccaacaggtgtaatgcatgccacaagcgtgttggtttgacaggatttagctgcaggtgtggaaacatcttctgtgcagcgcataggtactctgacaaacacaactgtcctttcgattataggacagccgcccgcgatgctattgctaaagccaatccggtagtgagggctgagaaacttgataaaatctaaaaagagtagaggatgaaggtgaaggtgaagaattgtgtaatgaagtatggggtttatggtcctacccattgtgtcgtcagctcatcatagtgaaggtttatttaaagttgggtgctttgtctcattaggtgtcccctttgatttgatataaaaaacaagttggaaagtggataatagggaggacaccattgcagtgtaaggaaagtctatattccttgtcaatttgttggcgatacatttaagttcgcccctgtttgtaagtctttgtttgtgctggtttgatggaacaatcgatatgatcgccttgtaatgcttcttttcatatgcacttctttcttcc

SEQ ID NO: 298 - protein, 169 aa, Gossypium hirsutum
MDPLDETGRQASEGPILCVNNCGFFGSAATMNMCSKCHKAMILKQEQAQLVASSIDSIVNGSTSGNGKEPSVAAALAVQCGNFGSKIESSIDPSHMTFGGMKTKEGPNRCNACHKRVGLTGFSCRCGNIFCAAHRYSDKHNCPFDYRTAARDAIAKANPVVRAEKLDKI

SEQ ID NO: 299 - DNA, 919 bp, Gossypium hirsutum
aaaataaaataaaatccaaaaagaaaaatcatacgatcaaagatcgtctttctcgtctggatttctccgattatcatacataaaactcttcgattaagtgatcactgggttcgattttgttagacaagatcggccgattaggatttcaggggattagagaagatggagtctcacgatgagacagggtgccaagccccagaaggccccattctttgtatcaacaactgtggcttcttcggcagtgcagctaccatgaatatgtgctccaagtgtcacaaagcgatgatcctgaagcaggaacaggcgcaacttgcagcatcatcaatcggaagcatcgtgaatggcagctcaactgggaacggtaaggaaccagccgtggctactgctttggatgtacaatctggaaacgccgacaccaaaatggtctcaacagagctacccattgacccatccggaacgacttcatgtgggatgaaaatgaaagagggtcctaacaggtgtaccaaatgctgtaaacgtgttggtttgacaggatttaactgcaggtgtggaaacctcttctgtgcagctcatcgttactccgacaaacatgactgccctttcgattaccgagctgctgctcgcaatgctattgctaaagccaacccagttgttcgggcagagaagctcgataaaatctgagaacaacccgggtcaagatgaagatatgtggatggtttatgtaagttggttacttgtctcatcaagtgtccccttgattgatattaaatgttgggagtccatcatagggagggacatgatttgcattgtaagtctatattttcccgtttgtaagtgtttttatttgtgcttgtttgatggacattgatatgatcaacttgtaatgcttcttctttgtggtatgcattttttttctttt

SEQ ID NO: 300 - protein, 172 aa, Gossypium hirsutum
MESHDETGCQAPEGPILCINNCGFFGSAATMNMCSKCHKAMILKQEQAQLAASSIGSIVNGSSTGNGKEPAVATALDVQSGNADTKMVSTELPIDPSGTTSCGMKMKEGPNRCTKCCKRVGLTGFNCRCGNLFCAAHRYSDKHDCPFDYRAAARNAIAKANPVVRAEKLDKI

SEQ ID NO: 301 - DNA, 543 bp, Sorghum bicolor
atggcgcagaagcgaaagagcatcgacgtcgtcgaggactgcggcggccacgcgcccgccgccaggcggtgtgcgaacgggtgcgggtacttcggcaacgccgcgaccggcggcatgtgctccaagtgctaccgcaagcacgccgccgccggcgccacggcgacgtctacctctaccaccaccgctgacaagaagacgacgacggcgcaggctgtttccgagacgccggcgccggcggagaagaaggccaagatcgcgtgcgccgtcgcgtcgtcgtcccctggcggcggcgtcgacaatgcaggcgcggcccgggctccgtccacggagccgcagccggtgaagcagactgcgaaccggtgctcggcgtgccgcaagaaagtgggcctgctggggttccggtgctgctgcggggaaaccttctgcggcgcgcaccggtacgcggagaagcacgcctgcggctacgactacaaaagcgccggccgcgagcggatcgccaagaacaacccggtcgtcgtcgccgacaagatcgccaagatttga

SEQ ID NO: 302 - protein, 180 aa, Sorghum bicolor
MAQKRKSIDVVEDCGGHAPAARRCANGCGYFGNAATGGMCSKCYRKHAAAGATATSTSTTTADKKTTTAQAVSETPAPAEKKAKIACAVASSSPGGGVDNAGAARAPSTEPQPVKQTANRCSACRKKVGLLGFRCCCGETFCGAHRYAEKHACGYDYKSAGRERIAKNNPVVVADKIAKI

SEQ ID NO: 303 - DNA, 453 bp, Sorghum bicolor
atggcggaggagcagcagcagcagcagcagcagaggtggcaggacggccaccgcctgtgcgccaacaactgcggcttcttcggcagccccgcgacgctggacctctgctccaagtgctaccgcgacctgtacccgcaggagcagcagcagccagcaccagcgggccccttcgttcctgccgcgtcggccttccatccttcctcctcgtcggtctctcccgagcccgagcctccggcggcctctgctgcaggcgccaaggccggcaggtgcgccagctgccggaagcgcgtgggcctgacggggttcgcgtgccgctgcggcgccaccttctgcggcgtgcaccggtacccggagcggcacgcgtgcgccttcgacttccgcgccgccggccgcgacgccatcgcgcgcgccaaccccgtcgtcaagggcgacaagctcaaggacaagatctga

SEQ ID NO: 304 - protein, 150 aa, Sorghum bicolor
MAEEQQQQQQQRWQDGHRLCANNCGFFGSPATLDLCSKCYRDLYPQEQQQPAPAGPFVPAASAFHPSSSSVSPEPEPPAASAAGAKAGRCASCRKRVGLTGFACRCGATFCGVHRYPERHACAFDFRAAGRDAIARANPVVKGDKLKDKI

SEQ ID NO: 305 - DNA, 600 bp, Sorghum bicolor
atggcggagaggcaggaggtcatctccggcgtcggtgcggcagcggcaccgatgtgcgccaacggctgcgggttcttcgggagcgcggcgaccaacaacttctgctcaacgtgctacaagcaggatcacctgatgatcaccaagaccgccggcgccggcgccgctcccctggaagcgtccggccgccgcggcctcatcgagtgcgccaacgcgtgcggttacttcgggtacccagcgaccaacaacctgtgcaccctctgctacagggacttcctcgaaagcgttcactcctcccctgccgcggcggacaaggtcgtcgtcctcgctgccgagcagccggcggcggcccagatctctgctgcaacttctagtgctacacgggcggtggaggcggcggcggcggcggcgtcgagcaggtgcgcgtcgtgccgcaagaaggtggggctgctggggtttccctgccgctgtggcggcacgttctgcgcgctgcaccggtacgcggagaagcacgcctgcggcttcgacttcaaggcggcgggccgggagaagatcgccaagaacaacccgctcgtcgtggccgccaagatcaacaagatctga

SEQ ID NO: 306 - protein, 199 aa, Sorghum bicolor
MAERQEVISGVGAAAAPMCANGCGFFGSAATNNFCSTCYKQDHLMITKTAGAGAAPLEASGRRGLIECANACGYFGYPATNNLCTLCYRDFLESVHSSPAAADKVVVLAAEQPAAAQISAATSSATRAVEAAAAAASSRCASCRKKVGLLGFPCRCGGTFCALHRYAEKHACGFDFKAAGREKIAKNNPLVVAAKINKI

SEQ ID NO: 307 - DNA, 570 bp, Sorghum bicolor
atgtcgcggcagcagataggtggcggtggcagcgccacgccgatgtgcgccgcgggctgcggtttctttgggagcccggcgaccctcggcatgtgctccgtctgctacaagaagcactgctgcaccattacggacggtccaggcgcctcctacgccgcaacggcgatcgatcccgtcgtcacccgatccaccgctaccgcggtgacccccgggcccggcgccgccgcggctaagccaacggtggtggccgcgcgcacgcccgccgcgagcgtctgtttgttggctcctgctgctaaaggcgccgtagcggaggccgccgccgtgtcgccgccccacgctcccgaggcggcggcgaagaagaagaaggcgccgccaccgggccggtgcgcggcgtgctgcaagaaggtggggctcacggggttcgtgtgccgatgcgggaacacgttctgcgggagccaccggtacgcggaggagcacggctgcagcttcgacttcaagggcgccagccgtgacgccatcgcccgcgccaacccggtcatcaaggcggagaagctgaccggcaagatctga

SEQ ID NO: 308 - protein, 189 aa, Sorghum bicolor
MSRQQIGGGGSATPMCAAGCGFFGSPATLGMCSVCYKKHCCTITDGPGASYAATAIDPVVTRSTATAVTPGPGAAAAKPTVVAARTPAASVCLLAPAAKGAVAEAAAVSPPHAPEAAAKKKKAPPPGRCAACCKKVGLTGFVCRCGNTFCGSHRYAEEHGCSFDFKGASRDAIARANPVIKAEKLTGKI

SEQ ID NO: 309 - DNA, 1324 bp, Triticum aestivum
atgcgcaacgccggctgttgaatattcttgctctatataaagggtccgttgctctgcatatggtgtacaagaacagagagggacagacacatttaacccaaggaccacgtacttccctagcttcttcccacgttgagctgagcgatggaccgacaagttcccgctacagatccttggtggtaccccggcgaggccgcagcatccaccggcgacgacgacttcctcgacattgaaggtctactcgggttggcgtgggaaggaggcacggctcttcccggcgtcggctctccgccaccggcgctggggccaccgtgcgcgtcgcctccagagccaacaccttccgaagacgtgatggcagcgtggctctacccgatcgtcagtggcgaggacaatgccggggacggccccatggtgaagggcaaaccgtcggccaaggcgtcggggagtttggggatgacggagagcgaggggaatcttccggctacggacggcatgtaccatgtcaaggagagctgtgatctcaacaaggacgaggccgagatcctgaagccatcctcctccacaccttcgcctccttccccaaccacaccaccaccaccaaccgctcaaataccagaaccgcaacctccacagtcgccaccacaaccaccggcagctcaattcttgtccaggccctgtgaagttgttcacatagagacttccaaaaagaggaaacatgctgatgcggtgtcaatggccatggcggctgcgccattgtcgcctgtgctgtttgttaaccgttgcaacgtgtgccgcaagagagttggtttgaccgggtttcgttgccggtgcgagaagctcttttgtccgcgccaccggcattcagaaagccacgactgctcatttgattataaaactgcgggccgggaggagattgcccgggcaaaccctcttatcagggctgccaagatcattaggatatgaggttcatctaagaattatatgaaagacttaaatcttggagatgctgcaagtgtatcatgctgtcattccaaggatgatccgaaagcatgaccactgccaacttgtgaagacattccccaaacaactaagctcttagtagcatacaagcctacattgagcaagagttggttgttgtgggagaatgcttcactcttgttcttcgtctggctatggttcactctatagcatctgaagctaccatgaacacagatgatagaacctatagtgtccagttgtaattctgttggatccaaagatttgttatattgtaatctttctttactattgttcaaattctacttaatgcaattgtgtgttactc

SEQ ID NO: 310 - protein, 156 aa, Triticum aestivum
MYHVKESCDLNKDEAEILKPSSSTPSPPSPTTPPPPTAQIPEPQPPQSPPQPPAAQFLSRPCEVVHIETSKKRKHADAVSMAMAAAPLSPVLFVNRCNVCRKRVGLTGFRCRCEKLFCPRHRHSESHDCSFDYKTAGREEIARANPLIRAAKIIRI

SEQ ID NO: 311 - DNA, 444 bp, Populus trichocarpa
atggactcgataaacagctcaactcttcctttgtgtgccaagggttgcgggttctttggttctccagagaacgagaatttttgttcaaagtgttataaagagtatctcaaagaagggttaattgctgagccttccaagaaactctctgaacctatcgtagtcaccccatcttttgatgataatagcccagatgttgttaccgacgaaacaacttcaacaactactgctgttgcatccacttcaaaagtgaagaatagatgtgaatgctgcaacaagaaagttggtttgatggggttcgagtgccgctgtgggaacaccttctgtggggttcatcgatatcctaaggagcactcttgtacttttgatttcaagactcttgatcaacaaaatttggccaagcaaaatccacttgttgcaggtgataaacttggttccagaatttga

SEQ ID NO: 312 - protein, 147 aa, Populus trichocarpa
MDSINSSTLPLCAKGCGFFGSPENENFCSKCYKEYLKEGLIAEPSKKLSEPIVVTPSFDDNSPDVVTDETTSTTTAVASTSKVKNRCECCNKKVGLMGFECRCGNTFCGVHRYPKEHSCTFDFKTLDQQNLAKQNPLVAGDKLGSRI

SEQ ID NO: 313 - DNA, 642 bp, Panicum virgatum
gccttcgcctacctctcgacgcccaaccccaaaaagaaaaattctcctcgcggagaaaggtcgcgtgccgtctcgcccacagttccgggcactgattgcttcgcctgtatgctgctggttgcctgccttgtgctgctactacatatgcaatctgtggagcaaccaaaaagaccttggcttcatgctatgattgtgtaaagcaattgactaaccaagcccatctgtaacaatggcacaggagagctggaaacaggaatctgaggagactggagtccatgcacctgaggccccaattctgtgcataaacaactgtggtttcttcggcagcagcatgacgaacaatatgtgctcgaagtgctacagggacttcatcaaattgatggaaggccctgtggttgagaagaaggtgatcacggtggcatcttcttctgcggcaccaatggagacagcaaagcaagatgatgtgcctgcagctgctgccactgaagctgtgacggagaagcaagcagagcaggagccgccaaagccgcccagcaaccggtgccttacctgccgcaagaaggttgggctgactggcttcctctgccgctgcgggggcaccttctgctccatgcaccgctacactgactcccaccagtgcac

SEQ ID NO: 314 - protein, 137 aa, Panicum virgatum
MAQESWKQESEETGVHAPEAPILCINNCGFFGSSMTNNMCSKCYRDFIKLMEGPVVEKKVITVASSSAAPMETAKQDDVPAAAATEAVTEKQAEQEPPKPPSNRCLTCRKKVGLTGFLCRCGGTFCSMHRYTDSHQC

SEQ ID NO: 315 - DNA, 626 bp, Zea mays
gctcgctccctccctccctccctcccgcgcggatcacagaagggctcacggtcacggccggcctcccaattcgcaacctcgcctccgcctctcctcctaccccctccgaaaagcaagctccggccgggccgccaccaccaccaccgcgcgcgcgtgcacgcgctcccacacacagacagacagacagacagacagagtgagagacgcacggtggttcggggtctcccttctgccaggcgcacgaggagccatggcgcagcgcgacaagaaggaggagcccacggagctccgggcgccggagatcacgctgtgcgccaacaactgcgggttcccgggtaacccggccacgcagaacctgtgccagagctgcttctcggcgtcgaggtcgccgtcgtcccctacctcctcctcctcttccctggcgtccgcggcgtcgcagccgaggccagcagcgctcgtcgtagacgcggcagcggtggaggcgctggccgctccggcggccgcggccgcgggccagggccaggctacggaagccgcggcgagggcgtccgcgagccggtgctccagctgccggaagcgcgtggggctgacggggttccggtgccgctgcggcgagctcttctgcg

SEQ ID NO: 316 - protein, 125 aa, Zea mays
MAQRDKKEEPTELRAPEITLCANNCGFPGNPATQNLCQSCFSASRSPSSPTSSSSSLASAASQPRPAALVVDAAAVEALAAPAAAAAGQGQATEAAARASASRCSSCRKRVGLTGFRCRCGELFC

SEQ ID NO: 317 - DNA, 449 bp, Glycine max
aaacaacccctttctcttctcttccaattacaaatcccttcttctctctctctctctttattctcatttcacaactcatcaatcccctctctctctctcccaaacgcaaaacctaagcatggctcagaaggcccagaaaaacgacactgagtttaaggtccccgaacccatcatcaacccctgcaccaccaccaccaccaccaccacctcgatttccgaaccttctagattcttcgatgcaaccacccccgccacttcatcgcgctccccaaagcgatccctccctctcgacgaggaatctcagacggaccaaacgacgtcttctgagcccaaacgcgccgtgaaccgctgctccggctgccggcggcgcgtgggactcacgggattccggtgccgctgcggggaccttttctgcgcagagcaccgctactccgaccgccacgactgct

SEQ ID NO: 318 - protein, 110 aa, Glycine max
MAQKAQKNDTEFKVPEPIINPCTTTTTTTTSISEPSRFFDATTPATSSRSPKRSLPLDEESQTDQTTSSEPKRAVNRCSGCRRRVGLTGFRCRCGDLFCAEHRYSDRHDC

SEQ ID NO: 319 - DNA, 1135 bp, Zea mays
  misc_feature (666)..(666): m is a or c
ccctcgtctccgcacagagagggctcctcgctgccgtgtgccgggcttcactttcccctctcgtctcctctcccatggctcagcgcgacaagaaggtggaggagccgacggagctgcgcgcgccggagctcacgctgtgcgccaacagctgcggcttcccgggcaacccggccaccaacaacctctgccaggcctgcttcctggccgccacggcttcctcctccgcctccgcctccgtctcgccgccgccgccctcctcctcctcctcgtcgccggcggtgctccagttcgacgagcagcagcagcagcaaaatccgaggccgcgtgcgccggcggcgtccgggcccacggaggaaccgcccaggccggcccgggcgtcagctccggctccggctccggcgtcgtcctcgtccgtccgccggtgccagacctgccgcaagcgggtggggctcacgggcttccgctgccgctgcggagacctcttctgcggcgcgcaccgctactcggaccgccacgactgctgcttcgactacagggccgccggccgcgacgccatcgccagggacaaccccgtcgtgcgcgccgccaagatcgttaggttctaggcgtctcggatccggccggaggagctagctagctagctaggggcgggcacacacacgcacmcgcggtgatgggcgccgagatccgtcgccggtcctcatcgccctctatagtccgtccccccttcctctcctcctctccctctttgattgtcctctcctttttttcttgctgtcatctatttttattgcgagggggaaaaatgatttgatggtcaccgatcgatccgtccttggagggtgttggttatgtgttgatcgccatgctgttttagaaaattattccgtttacgaggacgacgatcgacgagaagcgtcgaaaaagagaggggggagagaatgaagacgaaaagaatagtgcgatgataacgttgttgttgttgtttgtagcggtggtggtggtggctggtggaagcgatatggttcggttcggttcggtgtgctcttgtcctgctgggaatcacaaattcctgttgaattttttttatatatctttgtataaaacgaaattgaaaatgtttatatggtgtgcc

SEQ ID NO: 320 - protein, 176 aa, Zea mays
MAQRDKKVEEPTELRAPELTLCANSCGFPGNPATNNLCQACFLAATASSSASASVSPPPPSSSSSSPAVLQFDEQQQQQNPRPRAPAASGPTEEPPRPARASAPAPAPASSSSVRRCQTCRKRVGLTGFRCRCGDLFCGAHRYSDRHDCCFDYRAAGRDAIARDNPVVRAAKIVRF

SEQ ID NO: 321 - DNA, 731 bp, Panicum virgatum
aaacccatttccttcctgcctccacgacccagcccaggcccggcggtgcctctccctctcgtctccggatcggcaagagcccagctgctgccggattcacacgacacctcgtcgtctctctctctctctctctctctctctctctctctctcggcccatggcgcagcgcgacaagaaggtggaggagccgacggagctgcacgcgccggagctcacgctctgcgccaacagctgcggcttcccgggcaacccggcgaccaagaacctctgccagaactgcttcctggccgcctcggcctccgtgtcgccgccgtcgccctcctcctcctcgtcgccctcgccggcggtgttcgacaagccgcggccggcggccgcccctcccgccgtgtggccgccgttccccgcggccgccgaccggcccccggcgggccccgcggagtccccctccaaggcgccccggacgtcgtcgtcggtcaaccggtgccacagctgccagaagcgggtcgggctgacggggttccggtgccgctgcggcgagctcttctgcggcgcgcaccggtactcggaccgccacgactgcggctacgactacaagggcgtcgcccgggacgccatcgcccgggagaaccccgtcgtgcgcgccgccaagatcgtcaggttctgagagctggggagcaccggaggagaccacgcagctcagctccacgccgatcgtcgatccatctcccgcg

SEQ ID NO: 322 - protein, 168 aa, Panicum virgatum
MAQRDKKVEEPTELHAPELTLCANSCGFPGNPATKNLCQNCFLAASASVSPPSPSSSSSPSPAVFDKPRPAAAPPAVWPPFPAAADRPPAGPAESPSKAPRTSSSVNRCHSCQKRVGLTGFRCRCGELFCGAHRYSDRHDCGYDYKGVARDAIARENPVVRAAKIVRF

SEQ ID NO: 323 - DNA, 829 bp, Zea mays
gctcaggccagccgtgcggtagcttctccccccctcgtctccgcacagagagggctcctcgctgccgtgtgccggccttcactttcccctctcgtctcctctcctctcccatggctcagcgcgacaagaaggtggaggagccgacggagctgcgcgcgccggagctcacgctgtgcgccaacagctgcggcttcccgggcaacccggccaccaacaacctctgccaggcctgcttcctggccgccacggcttcctcctccgcctccgtctcgccgccgccgccctcctcctcctcgtctccggcggtgctccagttcgacgaccagcagcaaaatccgaggccgtgtgcgccggcggcgtccgggcccacggaggaaccgcccaggccggcccgggcgtcagcgccggcgtcgtcctcgtccgtccgccggtgccagacctgccgcaagcgggtggggctcacgggcttccgctgccgctgcggggacctcttctgcggcgcgcaccgctactcggaccgccacgactgctgcttcgactacagggccgccggccgcgacgccatcgccagggacaaccccgtcgtgcgcgccgccaagatcgttaggttctaggcgtctcggatccggccggaggagctagctagctagctaggggcgggcacacacacacacacacgcggtgatgggcgccgagatccgtcgccggtcctcatcgccctctatagtccgtcccccttcctctcctcctctccctctttgattgtcctctccttttcttctactgtcatctatttttattgcgagggggaaaaaatgatttgatggtc

SEQ ID NO: 324 - protein, 167 aa, Zea mays
MAQRDKKVEEPTELRAPELTLCANSCGFPGNPATNNLCQACFLAATASSSASVSPPPPSSSSSPAVLQFDDQQQNPRPCAPAASGPTEEPPRPARASAPASSSSVRRCQTCRKRVGLTGFRCRCGDLFCGAHRYSDRHDCCFDYRAAGRDAIARDNPVVRAAKIVRF

SEQ ID NO: 325 - DNA, 819 bp, Zea mays
gctcgctccctccctccctccctcccgcgcggatcacagaagggctcacggtcacggccggcctcccaattcgcaacctcgcctccgcctctcctcctaccccctccgaaaagcaagctccggccgggccgccaccaccaccaccgcgcgcgcgtgcacgcgctcccacacacagacagacagacagacagacagagtgagagacgcacggtggttcggggtctcccttctgccaggcgcacgaggagccatggcgcagcgcgacaagaaggaggagcccacggagctccgggcgccggagatcacgctgtgcgccaacaactgcgggttcccgggtaacccggccacgcagaacctgtgccagagctgcttctcggcgtcgaggtcgccgtcgtcccctacctcctcctcctcttccctggcgtccgcggcgtcgcagccgaggccagcagcgctcgtcgtagacgcggcagcggtggaggcgctggccgctccggcggccgcggccgcgggccagggccaggctacggaagccgcggcgagggcgtccgcgagccggtgctccagctgccggaagcgcgtggggctgacggggttccggtgccgctgcggcgagctcttctgcggcgcgcaccggtactcggaccggcacggctgcagctacgactacaggggcgccgcccgggacgccatcgcccgggagaacccggtggtgcagtggttgagggcccgaaacgatgaacagatgggttggttggattgggttaggtgtatgtatatgtcacacgcaactttggacagaactattatactagtact

SEQ ID NO: 326 - protein, 189 aa, Zea mays
MAQRDKKEEPTELRAPEITLCANNCGFPGNPATQNLCQSCFSASRSPSSPTSSSSSLASAASQPRPAALVVDAAAVEALAAPAAAAAGQGQATEAAARASASRCSSCRKRVGLTGFRCRCGELFCGAHRYSDRHGCSYDYRGAARDAIARENPVVQWLRARNDEQMGWLDWVRCMYMSHATLDRTIILV

SEQ ID NO: 327 - DNA, 835 bp, Gossypium hirsutum
aaaaaaaaagccaaaaaacccccaaatctctccttgtctctcttttcatatccatttttttctctcttctatttcttcccttttgcagggcaaaggaaaaaaaaaagcaacaaaaaatggctcaaagaaccgaaaaagaagaaaccgagttcaaggtaccggaaaccttaacgctttgcgtcaatgattgtggtgttataggaaatccggccaccaataacatgtgtcaaaattgtttcaacgctacaacgcctaaatcaaccgctgccgtcgtctcctcttcaaccggtggtgctagttcaggtggtgtttcgatcctgaaccaaagatctaccacgtcgcgttctataaacaagcgatccgatctttctccgcctaaaacgacgacgtttgttaggagttctggttcgaggaacgatccggagcctggtacggaaaagaaggtggtgaaccggtgttctggatgtagaaaacgtgtcggtttgaccgggtttaggtgtcgatgtggtgaactgttttgtgccgatcatcggtactcggatcgacacgattgtagttatgattacaagacggtcggtcgtgaggccatcgctagggaaaatccggtggttaaagcggccaagataattaaagtctgatatatattttttatgaaatcctattaaaatcatattattcggaaacatttttcgacccggaattcggaacagctatggaaattcaacctcgatctcatcatcaatccatggaggaagatgacgacatatctcacaagatcgtttcaaattgaagaagattatagtatttttaattttacttaattttctttttttgg

SEQ ID NO: 328 - protein, 173 aa, Gossypium hirsutum
MAQRTEKEETEFKVPETLTLCVNDCGVIGNPATNNMCQNCFNATTPKSTAAVVSSSTGGASSGGVSILNQRSTTSRSINKRSDLSPPKTTTFVRSSGSRNDPEPGTEKKVVNRCSGCRKRVGLTGFRCRCGELFCADHRYSDRHDCSYDYKTVGREAIARENPVVKAAKIIKV

SEQ ID NO: 329 - protein, 160 aa, Arabidopsis lyrata
MAQRTEKEETEFKVLDTLTTTTTTTLCTNNCGVTANPATNNMCQKCFNASLVSAAAGVVESGSILKRSARSVNLRSSPAKVVIRTREIDAVKRDQQIVNRCSGCRKKVGLTGFRCRCGELFCSEHRYSDRHDCSYDYKTAGREAIARENPVVKAAKMVKV

SEQ ID NO: 330 - DNA, 500 bp, Brassica napus
  misc_feature (269)..(269): n is a, c, g, or t
acattccattcatttcctctctctctctctctctctcctctgattctctctatacgacccgtgagctcgccggaggagggtgaaaccaataaagatggcgcagaggacggagaaggaagagacggagttcaaggtcctcgaatccctgacgacccccgccaccgccacgaccacgctctgctcaaataactgcggcgttacagcgaatccagccaccaacaacatgtgtcagaaatgtttcaacgcttccatcgccgccgcsggcgtanactccggttcgacgttgaagagagcgtcgagatccgtcaatcttaggcccacgccagccaaagtcgtgatccgtcccagggagatcgatccggttaagagagatcagcagacggtaaaccggtgttccggttgtcggaagaaggtcgggctgaccgggttcagatgccgatgcggtgaccttttctgctccgagcacygttactccgatcgccatgagtgcagctacgact

SEQ ID NO: 331 - protein, 135 aa, Brassica napus
  misc_feature (56)..(56): Xaa can be any naturally occurring amino acid
  misc_feature (59)..(59): Xaa can be any naturally occurring amino acid
  misc_feature (126)..(126): Xaa can be any naturally occurring amino acid
MAQRTEKEETEFKVLESLTTPATATTTLCSNNCGVTANPATNNMCQKCFNASIAAXGVXSGSTLKRASRSVNLRPTPAKVVIRPREIDPVKRDQQTVNRCSGCRKKVGLTGFRCRCGDLFCSEHYXSDRHECSYD

SEQ ID NO: 332 - DNA, 470 bp, Brassica napus
  misc_feature (459)..(459): n is a, c, g, or t
atattccattcatttcctctctctcttctctctcaataccattcgtaagctcgccggagaaactcatcaataaagatggcgcagagaacggagaaggaagagacggagttcaaggtggtcctcgaaaccttgccgacgacgacaaccccgacgctctgctccaacaactgcggcgtcaccgcgagtccatcaaccaacaacatgtgccagaaatgtttcaacgcctccgtcgccggtatagatccaaatccgatcgtgaaaagatcagccagatccgtcagtctccggtcaacgccagccagagccgtgatccgtcccagggagaccgatccggttaagagagaccaccatcagcagaccgtaaaccgatgctccggctgtcggaagaaggtcgggttgaccggattcagatgccgatgcggcgaccttttctgctccgagcatcggtattcggatcgncacgagtgcag

SEQ ID NO: 333 - protein, 131 aa, Brassica napus
  misc_feature (128)..(128): Xaa can be any naturally occurring amino acid
MAQRTEKEETEFKVVLETLPTTTTPTLCSNNCGVTASPSTNNMCQKCFNASVAGIDPNPIVKRSARSVSLRSTPARAVIRPRETDPVKRDHHQQTVNRCSGCRKKVGLTGFRCRCGDLFCSEHRYSDXHEC

SEQ ID NO: 334 - DNA, 819 bp, Gossypium hirsutum
ctaattttctctccaaccaaacactaattctctccttcctctccatcctccccttcaaatttgttgttttccttttcctccttcgaaatcacctcaaggagatatggctcaaagaaccgaaaaagaagagactgaattcaaagtacctgaaaccctgactctatgcgttaacaactgcggggttacggggaatccagccaccaacaacatgtgccagaaatgttttagttccaccacggccgccacatcctcctcttcctcttccaccaacaacaccgctacttccgctaccgacgataaatcctcgagatctacgccgactcgttcacaggacaaccgatccgactccgctccgcctacaacagctgcaacaacggcaacagcaacagcaacgacgaatagtccgatgactgcttcaaatcggtctggatacgataccgcggaaaagaagtcggtgaatcgatgttctggttgcagaaaacgcgttgggttgacggggttccggtgtcgatgcggggagcttttctgttcggaccatcggtactcggatcgacacgattgtagctacgactacaaggcggcgggtcgcgaagccatcgctagggaaaatcccgtggttaaagcagccaagattatcagagtttagtttttaccaaatggatccaaattaaattaaataaactattcaaaacatttttcgacctgaaaatagcaagttgtggagatctatgctcgatctcaaaaagaaaaagaaaaaagtaaaaaaagactgtttcagagagggagaaatgagtcggtcgaaatcttgattgcaaaaat

SEQ ID NO: 335 - protein, 180 aa, Gossypium hirsutum
MAQRTEKEETEFKVPETLTLCVNNCGVTGNPATNNMCQKCFSSTTAATSSSSSSTNNTATSATDDKSSRSTPTRSQDNRSDSAPPTTAATTATATATTNSPMTASNRSGYDTAEKKSVNRCSGCRKRVGLTGFRCRCGELFCSDHRYSDRHDCSYDYKAAGREAIARENPVVKAAKIIRV

SEQ ID NO: 336 - DNA, 533 bp, Glycine max
cttcgtcctctctctcacatcacaatttcataaaaaacctctttttaagtttcttgcttctttctctctgaaagaaaattgaagtcctaaccagttggctcttttgttttatcgttctccatggctcagaaaaccgagaaagaagaaaccgacttcaaagttccggaaacgattacgctttgcgtcaacaactgcggcgtcaccggaaaccctgccacgaataacatgtgccagaagtgcttcactgcctctaccgccaccacttccggcgccggaggtgccggaatagcttctccggcgaccagatccggcgtctccgcgcgtcctcagaagagatcttttcctgaagagccctcgccggtggcggatcctccttcttcggaccagacgacgccgtcggaggcgaagcgcgtggtcaaccgctgctccggatgccggcggaaagtcggactcaccggattccggtgccggtgcggcgagctcttctgcgccgagcaccggtactccgacccgcacgactgcagctatgacta

SEQ ID NO: 337 - protein, 137 aa, Glycine max
MAQKTEKEETDFKVPETITLCVNNCGVTGNPATNNMCQKCFTASTATTSGAGGAGIASPATRSGVSARPQKRSFPEEPSPVADPPSSDQTTPSEAKRVVNRCSGCRRKVGLTGFRCRCGELFCAEHRYSDPHDCSYD

SEQ ID NO: 338 - protein, 164 aa, Panicum virgatum
MAQRDKKEEPTELRAPEITLCANSCGFPGNPATQNLCQNCFLAASASTSSPPSPSSSSSSSSSSLPGLSPVVDKPRPAPMELASPAVDRAPAVEVKAGKTSVNRCSSCRKRVGLTGFRCRCGELFCGEHRYSDRHGCSYDYKAAARDAIARDNPVVRAAKIVRF

SEQ ID NO: 339 - protein, 163 aa, Phyllostachys vivax
MAQRDKKEEPTELRAPEITLCANSCGFPGNPATQNLCQNCFLAASASTSSPPSPSSSSSSSSSLPGLSPVVDKPRPAPVELASPAVDRVPAVEVKAGKTSVNRCSSCRKRLGLTGFRCRCGELFCGEHRYSDRHGCSYDYKAAARDAIARDNPVVRAAKIVRF

SEQ ID NO: 340 - DNA, 1019 bp, Panicum virgatum
ctcgctcctcgccgatcacagccgcgacctcctccccaatcccgatttcgcgagctcgtccccccgcttcccggcctctcccgtctccccgccccccgcccgccctccgagaggcgaagctccgggccgcgccaccgcgcaggcacacccaaggcagcaggcgcggttccttccaccaggtgcgcgggcggcggcatggcgcagcgcgacaagaaggaggagcccacggagctccgggcgccggagatcacgctctgcgccaacaactgcggcttcccggggaacccggctacgcagaacctctgccagagctgcttctcggcggccacggcgtcgatgtcgtcgccgacctcctcctcgtcctccccggctcccgcgccggccgcgacgccccagccgaggccggcgccggtggagctggcctccccggccgacgcggccgtggcggccccggctccggaggcggcgaggacgccggcgaaccggtgctcgagctgccggaagcgggtggggctcacggcgttccggtgccggtgcggcgagctgttctgcggcgcgcaccggtactcggaccggcacggctgcagctacgactacaagggcgccgccagggacgccatcgcccgggagaacccggtggtgcgcgccgccaagatcgttaggttctgatcgtcgacggagtcaaaatccctccatccagaggatacaaagcaagcaagcaaggaaaacaaagaggagacacacatccacggaaatggaaggcctttcccttggtgttactatgctgttcttcgaagcgtttgattttcaatctcctttcttttttacgattttcaaatggaagaaaaacgggaagaaaagaggtggacaaagaatagtgtaataataatgggggtgatgatgccgccgcggtggttgagggcaaaaggatgaacaaaatggattggatgtatgtacctgtcagtcgcaaagctttgtgcaaaaaatattatacatttctatctttcgtacagaaaccc

SEQ ID NO: 341 - protein, 157 aa, Panicum virgatum
MAQRDKKEEPTELRAPEITLCANNCGFPGNPATQNLCQSCFSAATASMSSPTSSSSSPAPAPAATPQPRPAPVELASPADAAVAAPAPEAARTPANRCSSCRKRVGLTAFRCRCGELFCGAHRYSDRHGCSYDYKGAARDAIARENPVVRAAKIVRF

SEQ ID NO: 342 - protein, 172 aa, Sorghum bicolor
MAQRDKKEEPTELRAPEITLCANNCGFPGNPATQNLCQSCFSAATASRSSSPSSPTSSSSASAVSQPRPAALVDAAAVELLASADAAAVGQSMEVVAAAPAATAARSSAVNRCSSCRKRVGLTGFRCRCGELFCGAHRYSDRHGCSYDYKGAGRDAIARENPVVRAAKIVRF

SEQ ID NO: 343 - protein, 163 aa, Zea mays
MAQRDKKEEPTELRAPEITLCANNCGFPGNPATQNLCQSCFSASRSPSSPTSSSSSLASAASQPRPAALVVDAAAVEALAAPAAVAAAAGQATEAAARASASRCSSCRKRVGLTGFRCRCGELFCGAHRYSDRHGCSYDYKGAARDAIARENPVVRAAKVVRF

SEQ ID NO: 344 - protein, 161 aa, Hordeum vulgare
MAQRDKKVEEPTEVHLHAAEITLCANSCGFPGNPATKNLCQNCFLASSSSPPSPSSSPPAFPLFDKPRPAAAASPALQAPPVYMAVDRPADPKASKSSVNRCHNCRKRVGLTGFRCRCGEMFCGAHRYSDRHDCSYDYKSAARDAIARENPVVRAAKIVRF

SEQ ID NO: 345 - protein, 163 aa, Hordeum vulgare
MAQRDHKQEEPTELRAPEITLCANSCGFPGNPATQNLCQNCFLAGPASTSPSSSSSSLPGASVSTPVLDRPRPAPVDAELAHPAVDYRATATEAKPARTSVNRCSSCRKRVGLTGFRCRCGDVFCGEHRYSDRHGCSYDYKAAARDAIARDNPVVRAAKIVRF

SEQ ID NO: 346 - protein, 160 aa, Zea mays
MAQRDKKEEPTELRAPEITLCANNCGFPGNPATQNLCQSCFSASRSPSSPTSSSSSLASAASQPRPAALVVDAAAVDALAAPAAAAGQATEAAARASASRCSSCWKRVGLTGFRCRCGELFCGAHRYSDRHGCSYDYKGAARDAIAREDPVVRAAKVVRF

SEQ ID NO: 347 - protein, 174 aa, Zea mays
MAQRDKKVEEPTELRAPELTLCANSCGFPGNPATNNLCQACFLAATASASASVSPPPPSSSSSPAVLQFDDQQQQQQQQNPRPRAPAASGPTEEPPRPARAPAPAPASSSSVRRCQTCRKRVGLTGFRCRCGDLFCGAHRYSDRHDCCFDYRAAGRDAIARDNPVVRAAKIVRF

SEQ ID NO: 348 - protein, 163 aa, Zea mays
MAQRDKKEEPTELRAPEIALCANNCGFPGNPATQNLCQSCFSASRSSSSSSQPSPTSSPSASAPAAAVPQPRPALLDAALQLAPPAAAAGQPVEASARTSANRCSSCRKRVGLTGFRCRCGDLFCGAHRYSDRHGCRYDYRGAARDAIARENPVVRAAKIVRF

SEQ ID NO: 349 - protein, 163 aa, Hordeum vulgare
MAQRDHKQEEPTELRAPEITLCANSCGFPGNPATQNLCQNCFLAGPASTSPSSSSSSLPGASVSTPVLDRPRPAPVDAELAHPAVDYRATATEAKPARTSVNRCSSCRKRVGLTGFRCRCGDVFCGGHRYSDRHGCSYDYKAAARDAIARDNPVVRAAKIVRF

SEQ ID NO: 350 - protein, 140 aa, Ricinus communis
MCQKCFNATTSTSTSNSTTSTTTTAIISASAGSSGSGILTISPRSSASLMVIRDPQPETSESTADREKNDVLVAKRDVNRCSGCRRKVGLTGFRCRCGDLFCWEHRYSDRHDCSYDYKTVGREAIARENPVVKAAKIVRV

SEQ ID NO: 351 - protein, 160 aa, Ricinus communis
MAAQKREKEETELKVPESIPLCSPTLPVPSPSPPSTTTHLSVAVISNLKRSDRSSTESIDLKVSSMDDQSRSTSAASPESMDLVGRKTGVKRQREANRSSGMGCRRKVGLMPFRCRCGEVFCSEHRYSDRHDCSYDYKAAGREAIAKENPVVKAAKILKV

SEQ ID NO: 352 - DNA, 1904 bp, Zea mays
acatcctaatcgaaaacccggtttattttttcttcgtcctggatgcgtcggtcgcgtgtttgatctgactaagccgcggaggagggtgctagatgtccgtgcggtgggcggtggctcccgagggcgaccggagttaggtccttgccgccttcagtgcggtggggaagcgagacattgaaggcgcagaacccaaagaatgggtaagagaggaaagtggtttagtgcggtgaagaaagtcttcagctcctccgatccagatggaaaggaagccaaggcccagaaggcagacaaatcgaaatccaagaggagatggccatttggaaagtccaagcactcggagccttccatatcgacggtgccaggcactgctccagcagtagctccgttgccatcaccaccagcaactcagccccactctctggagatcaaagatgtcaatccagttgaaacagacagtgagcagaacaagcatgcctactccgttgcgcttgcgtctgctgtcgctgctgaagctgcagcagttgctgcccaggctgctgcggaagttgtccgcctcacagcagttaccacggctgcaccaaagatgcctgttagttcgagggaataacttgccgccaccaagattcagactgccttcaggggttatctggcaaggagagcattgcgtgcactaagagggctagttagattgaagtcgcttgttgatggaaatgctgtcaaacgccaaaccgctcacaccttgcaatgcacacaagcaatgacaagagttcaaactcaaatctactctagaagggtgaagttggaggaggagaaacaggctcttcaaagacaactccaattgaaacatcaaagggaacttgagaaaatgaagattgatgaagattgggatcacagccatcaatccaaagagcaaattgaggccaacctaatgatgaaacaggaagctgcactgaggcgagagagagcacttgcatatgcattttctcaccagtggaggaattctggtcgaactataacccctacttttacggaacctgggaaccccaactggggctggagctggatggagcgctggatgacagcaagaccatgggagagtcggttggcggcggcatcggacaaggaccctaaagaacgtgctgtgacaaagaatgcgagcaccagtgctgttcgagtacctgtatcccgtgccatctcgattcagagaccagcaacaccaaacaagtcgagccgcccaccaagccggcagtcactttcaaccccgccatcgaagaccccgtcagcctcaggaaaggccaggccggcaagtccaaggaacagttggctgtacaaggaggatgacctgaggagcatcacgagcatccgctccgagcgcccaaggaggcagagcacgggtggaggctcggtccgggacgataccagcctgaccagcacaccacctctccccagctacatgcagtcgaccgagtctgcacgggccaagtctcggtaccgcagtctactactgactgagaagcttgaggttcctgagagagcgcctctggcccactccgttgtcaagaagcgcctgtcgttccccgtcgtcgagaagccaagcgttgtgccgacagagaagcccagggaaagagtgaggcgccattccgaccctccgaaggtcgatcctgcgacgctcaaggatgcccctgctgcctgaccagtgaccaggccttatgtgattgttaggtttcgtgctcttttaacaccgtgatgtattatctgagttaggttgctttgttcgtgtcatcgtatgatctgtccgggttgattttgagacagttctaactgtgtttacagacaatgcgtgatgctaaatgtatgtgtggttggttggctttaaatgtactgatatgatagtatttgatttc

SEQ ID NO: 353 - protein, 498 aa, Zea mays
MGKRGKWFSAVKKVFSSSDPDGKEAKAQKADKSKSKRRWPFGKSKHSEPSISTVPGTAPAVAPLPSPPATQPHSLEIKDVNPVETDSEQNKHAYSVALASAVAAEAAAVAAQAAAEVVRLTAVTTAAPKMPVSSREELAATKIQTAFRGYLARRALRALRGLVRLKSLVDGNAVKRQTAHTLQCTQAMTRVQTQIYSRRVKLEEEKQALQRQLQLKHQRELEKMKIDEDWDHSHQSKEQIEANLMMKQEAALRRERALAYAFSHQWRNSGRTITPTFTEPGNPNWGWSWMERWMTARPWESRLAAASDKDPKERAVTKNASTSAVRVPVSRAISIQRPATPNKSSRPPSRQSLSTPPSKTPSASGKARPASPRNSWLYKEDDLRSITSIRSERPRRQSTGGGSVRDDTSLTSTPPLPSYMQSTESARAKSRYRSLLLTEKLEVPERAPLAHSVVKKRLSFPVVEKPSVVPTEKPRERVRRHSDPPKVDPATLKDAPAA

SEQ ID NO: 354 - DNA, 1918 bp, Arabidopsis thaliana
acaaatactcttcttcacacagctttgaatccatctgtcttctcctctctctctcttctccatttgcaattacgataatgtgaaagcaataagaagaggaaaagttatcttcgcacctcagcaaagatccaatcgattcgattcttaagctttttcgtcttctccgataaggtcactacttagaagccgcgttgtggtttagttgactcctccaggttttatcttcaagctttttcgtctatcagatctggtgtcactgtcttctcataggattacatagagatggggaaaaaagctaaatggttttcaagtgttaagaaagcattcagcccagattcaaagaagtcgaagcaaaaattggctgagggacaaaatggtgttatctctaatcctcctgttgtggataatgttagacaatcttcttcttctcctcctcctgctcttgctcctcgtgaagtgagagtagctgaagtgattgttgaacggaacagggatctttcacctccttctacagcagatgctgtgaatgttacagctactgatgttcctgtagttccatcttcatctgctcctggtgttgttcgtcgcgctacacctactcgatttgctggaaagtcaaacgaagaagccgctgctatcttgatccagactatatttagaggttatttggcaaggagagcgttgcgggcaatgaggggtttggtcagacttaagttattgatggaaggatctgttgttaagcggcaagctgcaaatactctaaaatgtatgcagactctctctcgtgtacagtcgcagatccgagctaggagaatcaggatgtcagaagagaatcaggctcgccagaaacaactccttcagaaacatgctaaagagctagctggcttgaagaacggggataactggaatgatagcattcaatcaaaggagaaagttgaagcgaatttgctaagcaagtacgaggcaacaatgagaagggaaagggcattggcttattcatactctcatcagcaaaactggaagaacaactctaaatctggaaacccgatgttcatggatccaagcaacccgacatggggttggagctggttggagagatggatggctggtaggccactagagagttccgagaaagaacaaagcaacagcaacaatgacaatgctgcctcggtcaagggctctattaaccgcaacgaagctgcaaaatctctaacccgcaatggctcaactcaaccaaacacaccatcatccgcaagagggaccccaagaaacaaaaacagtttcttctcacctccaactccctcaaggctaaaccaatcctcgaggaaatccaatgacgacgactccaaaagcacaatctcggtcctgtccgagaggaaccgcagacacagcattgctggttcatcagtcagagacgatgagagcctcgctggctcaccagctctcccgagctacatggttccaactaaatcagctcgagccaggctcaagccccaaagcccattaggtggtaccacacaggaaaacgaagggttcacagacaaggcatcagctaagaaacggctctcgtatccaacttcgcctgcattgcctaaaccacggcggttctcagctccccctaaggtggagagtggcggcgttaccgtgaccaacggagcaggcagctgaggtattttatttaatataattattttcccacttatgaatgtgtccgagattgttgtctcttatgtgttcccttcatttcgtaattcatttgtgcagtgtaagcgccagtcatttatttttttactataataaattttataaccttttaaaattcatgttcttttgtttctttgaatatttaagttatttttattaatgttggatgaattggaatatgatgatgttatttgtattgtaatgcagatccttt

SEQ ID NO: 355 - protein, 461 aa, Arabidopsis thaliana
  misc_feature (78)..(78): Xaa can be any naturally occurring amino acid
  misc_feature (180)..(180): Xaa can be any naturally occurring amino acid
  misc_feature (243)..(243): Xaa can be any naturally occurring amino acid
  misc_feature (370)..(370): Xaa can be any naturally occurring amino acid
  misc_feature (377)..(377): Xaa can be any naturally occurring amino acid
MGKKAKWFSSVKKAFSPDSKKSKQKLAEGQNGVISNPPVVDNVRQSSSSPPPALAPREVRVAEVIVERNRDLSPPSTXADAVNVTATDPVVPSSSAPGVVRRATPTRFAGKSNEEAAAILIQTIFRGYLARRALRAMRGLVRLKLLMEGSVVKRQAANTLKCMQTLSRVQSQIRARRIRXSEENQARQKQLLQKHAKELAGLKNGDNWNDSIQSKEKVEANLLSKYEATMRRERALAYSYSHXQNWKNNSKSGNPMFMDPSNPTWGWSWLERWMAGRPLESSEKEQSNSNNDNAASVKGSINRNEAAKSLTRNGSTQPNTPSSARGTPRNKNSFFSPPTPSRLNQSSRKSNDDDSKSTISVLSERNRRHXIAGSSVXDDESLAGSPALPSYMVPTKSARARLKPQSPLGGTTQENEGFTDKASAKKRLSYPTSPALPKPRRFSAPPKVESGGVTVTNGAGS

SEQ ID NO: 356 - DNA, 1083 bp, Zea mays
aacccccgccgtatcggtcttgttcgttgtcctgccagatacagataggtggctaccactggctcgcgtgacctgttggcttgcttgctcctctccaggttcaggcaggggagagtgcctgtttcgagggggcgtggagcggagccggagccatggggaagaagggcaagtggttcggcgccgtcaagaaggtcttcagccctgaatccaaggagaagaaagaggagagcaacattgaccggggatccgttaagagcatgagcttgaaccttggagagggtgagatcacaaaagctttcaaccgccgggactcaaagctagaaaagccatcgccgccaactccaagaccggcccgtccaacttccaggcattcccctttgacgccctctgctagagtggcaccgatacctgcgaggagaaaatctgtcacgcccaagaacgggctttcacaggtggacgatgacgcgaggagcgtgctcagtgtgcagtctgagcggccaaggaggcacagtatagccacctcgactgtgcgggacgacgagagcctcacgagctccccgtcgctcccaagctacatggttcccacagaatctgcaagggccaaatctcgcctccagggttcagcaatggccaatggcgcagagacacctgagaaaggaggctcaactggaccagccaagaagaggttatccttccagggtggaactgcggctgcctcgccaatgcgacgacattctggtcctcccaaggtggagatcgcgccaccacaaccagaggccttggtagtcaatggtggaagcaagtgacacatatgtgatgagtaccaggatgagaaacggattatgaagatattagtttcattttcatccatgaatagaagttaaaagtggtatcatatctatgaatggtttcaattgtttttctgttacaaccacattatttgctatatacgattcacagtacctgccagttgattccattggttgtttctgtaaaacaaatatcaatttgtcactagaatctgtgatgtttgtatgtaaacagatcctctatttatgtgagacatatatttcttttctttcg

SEQ ID NO: 357 - protein, 217 aa, Zea mays
MGKKGKWFGAVKKVFSPESKEKKEESNIDRGSVKSMSLNLGEGEITKAFNRRDSKLEKPSPPTPRPARPTSRHSPLTPSARVAPIPARRKSVTPKNGLSQVDDDARSVLSVQSERPRRHSIATSTVRDDESLTSSPSLPSYMVPTESARAKSRLQGSAMANGAETPEKGGSTGPAKKRLSFQGGTAAASPMRRHSGPPKVEIAPPQPEALVVNGGSK

SEQ ID NO: 358 - protein, 500 aa, Oryza sativa
MGKKGNWFSAVKKVFSSSDPDGREAKIEKADKSRSRRKWPFGKSKKSDPWTSTVAVPTSTAPPPQPPPPPPTHPIQPQPEEIKDVKAVETDSEQNKHAYSVALASAVAAEAAAVAAQAAAEVVRLTTATTAVPKSPVSSKDELAAIKIQTAFRGYLARRALRALRGLVRLKSLVDGNAVKRQTAHTLHCTQTMTRVQTQIYSRRVKMEEEKQALQRQLQLKHQRELEKMKIDEDWDHSHQSKEQVETSLMMKQEAALRRERALAYAFSHQWKNSGRTITPTFTDQGNPNWGWSWMERWMTSRPWESRVISDKDPKDHYSTKNPSTSASRTYVPRAISIQRPATPNKSSRPPSRQSPSTPPSRVPSVTGKIRPASPRDSWLYKEDDLRSITSIRSERPRRQSTGGASVRDDASLTSTPALPSYMQSTESARAKSRYRSLLTDRFEVPERVPLVHSSIKKRLSFPVADKPNGEHADKLMERGRRHSDPPKVDPASLKDVPVS

SEQ ID NO: 359 - DNA, 1695 bp, Triticum aestivum
ataggacttcacagacagactgactcaatcctaacccaatccctcccatgcttccatctactctagcagaaattgcagaggaggttggccgccgccggctccagcgcaggcgcagcctacccgcgggatctgacgccctccgcctcctacctcgaggcacgcgcctcaggctcagctcccccgcccgccctcccccgctaccccgacgacttccaagaggaggagcatgaaattgagcatgtcgccgccgcgccagcgccagcgccagccacggatgcgccgctacctgcccctcctgccgccgcaccaccacaggttcaggctgccattgcgccggcttcttcctcttgtgtcatgtccagggagctcgccgccaccaagatccagaccgccttccgaggtcacctggcaagaagggcgctgcgggcattgaaaggcctggtcagactcaagtcgctggtccaaggccactccgtcaagcgccaggccaccagcacgcttcgctgcatgcagactctgtcccgggtccagtccaagatacggacgaggaggatcaagatggccgaggagaaccaggcccttcagcgccagctcttgttgaaccaggaactagagactctcaggatgggagatcagtggaataccagcctgcagtccaaggagcaaatcgaggcgagcctcgtgagcaggcaagaggccgcggctagaagagaacgggctctcgcatacgcattctcccaccagtggaagagcacctcaaggtctgccaacccgatgttcgtggacccgagtaacccgcactggggctggagctggctggagcggtggatggcgtcgaggccgttcgacggccgcaacggggcgtccgagaaggagggcagcagcgtcgaccgcacgtcggtgcacagcaccagcctgagcatgaacctcggagaaggtgagacggtcacaaaggcggacaaccaggtggtggactctttgaagccgaatgatgataagccgccgccgctttcgactccgaagccgtccggccctgcccccaggcagtccccgtcgacgccctcgccggcgctggcgaggaagaagagcgcgacgcccaagagtggagactgcgacggcgacgacgcgaggagcgtggtcagcactgtccggtccgagcggccccggaggcacagcatcggcgcgtccagcgtgcgtgacgacgcgggctcttccccgtcggtgccgagctacatggcggccaccaagtcggcgtcggccagggccaagtcgcgtgtgcagagcccgacgctgaccgagggtgctgctcaagctgagacgctggagaaaggatggtcttctgtgggttcagcgaagaagcggctgtcctttccggctgggacgccaccgccggtgccggcggcggcggcgaggcggcactccgggcctcccaaggtgcggcaggcgggcgtggaaggtggtacggaggaacgggactcgtcccttgcgtgacatcatgggaagcagattatggtgtggagcagagcagagcggaatttgttgcatttgttgagtgaaaggaacgcagaatgtgtgttgtgtggatccattggatttgatttgatttgtatgatggcagtattcctatttgattattcattgaataatataagtatctgtaatgaagataaaaggaggggacacgaacattatttc

SEQ ID NO: 360 - protein, 378 aa, Triticum aestivum
MSRELAATKIQTAFRGHLARRALRALKGLVRLKSLVQGHSVKRQATSTLRCMQTLSRVQSKIRTRRIKMAEENQALQRQLLLNQELETLRMGDQWNTSLQSKEQIEASLVSRQEAAARRERALAYAFSHQWKSTSRSANPMFVDPSNPHWGWSWLERWMASRPFDGRNGASEKEGSSVDRTSVHSTSLSMNLGEGETVTKADNQVVDSLKPNDDKPPPLSTPKPSGPAPRQSPSTPSPALARKKSATPKSGDCDGDDARSVVSTVRSERPRRHSIGASSVRDDAGSSPSVPSYMAATKSASARAKSRVQSPTLTEGAAQAETLEKGWSSVGSAKKRLSFPAGTPPPVPAAAARRHSGPPKVRQAGVEGGTEERDSSLA

SEQ ID NO: 361 - DNA, 1470 bp, Triticum aestivum
atggggaaaagagggagttggttctctgctttgaagaaagccctcggttcctctaagaaatccaaatcaaagaagaaatggtcagaaaaagagaagaaccgggatctaggtgtttcttcacatgaagaaaccgttgcaccctctctttctcctcctcgtacaccacctcctcctacagcagaagatgtgaaattaactgaagctgagaacgagcagagcaagcatgcttattccgtggcgcttgccactgctgtggcagctgaggcagctgttgcagccgcccaggctgccgctgaggttgttcggcttactacagtggcacattactctggaaaatcgaaggaggaaatagctgcaatcaggattcaaacagcatttagaggatacctggcgaggagggcattacgtgctttgagagggctggtgagattgaagtcattgatacaagggcaatctgtcaaacggcaagcaactgccacattacgagccatgcagactcttgctcgtgtgcagtctcagattcgtgcaagaaggatcagaatgtccgaggaaaatgaggccctccaacggcagctccagcagaaacatgacaaagaacttgagaagttgagaacttctattggagaacaatgggatgatagcccacaatcaaaggaagaagttgaagccagcctactacaaaagcaagaagctgccatgagaagagaaagggcactggcttatgcatactcgcatcagcaaatgtggaagcaatcttcaaaatcagcaaatgctacattcatggatccaaacaatcctcgttggggatggagttggttagagaggtggatggcagcccgaccttgggagagccgaagcacaatagataacaatgatcgggcctctgttaagagtacaacaagccgtaccatgtctcttggagaaatcagcagagcttattctcgtcgtgatcttaaccatgacaataaagcttctcctggtgcgcaaaaatcaagtcggcctcccagtcggcaatcaccttctactcccccctctaaggcaccatctacatcttcagtaacagggaaagcaaagccaccaagccctagagggagtgcttggggaggagacgaggactccaggagcacattcagtgtccagtctgagcgctatcggagacatagcatagcagggtcatcaataagagatgatgagagtcttgcaagttcgccttcagttccaagttacatggcacccacacggtcacagtcagcaaaggcaaaatcccgcttgtcaagcccgttaggcatagataataatgggacaccagataaggcatcagtgggttatgtaaagaagcggctttccttctctgcttcaccagctggagcaaggagacactctggtcctcctagggtggatgccagtgctgttaaagacattcaaatgcacagagaagagaaaatgagcaatggagcaagcagcaagtag

SEQ ID NO: 362 - protein, 326 aa, Triticum aestivum
MQTLARVQSQIRARRIRMSEENEALQRQLQQKHDKELEKLRTSIGEQWDDSPQSKEEVEASLLQKQEAAMRRERALAYAYSHQQMWKQSSKSANATFMDPNNPRWGWSWLERWMAARPWESRSTIDNNDRASVKSTTSRTMSLGEISRAYSRRDLNHDNKASPGAQKSSRPPSRQSPSTPPSKAPSTSSVTGKAKPPSPRGSAWGGDEDSRSTFSVQSERYRRHSIAGSSIRDDESLASSPSVPSYMAPTRSQSAKAKSRLSSPLGIDNNGTPDKASVGYVKKRLSFSASPAGARRHSGPPRVDASAVKDIQMHREEKMSNGASSK

SEQ ID NO: 363 - DNA, 1876 bp, Gossypium hirsutum
aacttttcttagttatcctctgcaaatgccaacctgttcttttattattattttccgccatttttgctctctttcaagcattttttttttgcctagatccacttctctctctttgatttttaattactgcatttttgttttaatacacaataagaacaactaagagatagaatgtgacttatcaatcttttaactgagatctgtgagaatttttctatgtaccaaggaattatttacagatgggaaaaaaaggtggctggctttctattgtgaagaaagctttgagccctgaatccaagaaatctcagcaccaaactccaaagccaaagaaaaaatggttcggaaaaagcaaaaatttgagccctgtgtctgtgcctgaagaaactgaagtgataactgaagatgcaaagctaaaagaagctgaaaacgaacaaagcaaacatgcctactctgtggctcttgccaccgctgtggcggccgaggcagcggtggcagctgctcaggcggctgctgaagttgtccgtctcacttctcagccgcgccatctggggaagtcaaaggaggaaatagctgctatcaggattcaaacagcatttcgtggatatttggctaggagggcactgcgagctttgagagggttggtaaggttgaaatcgttgatcagagggcaatccgtcaaacgccaagcaactacaacgttaagatgcatgcagactctagctcgtctgcagtctgagatttctgcaaggaggattagaatgtcagaagagaaccaggctcttcagcgccagcttcaacagaaatgccagaaagagctcgagaagttgagagctcccatgagagaagactggaacgatagtacacagtcgaaggagcagatcgaagcaagacaacaaaataagcaaggagctactatgaaaagggaaagagcattggcttatgcatactgtcaccagcgatcgtggaagaactgttctagatcagtgaatcaaacatttatggatccgagtaattcacactggggttggagttggttagagcgatggatggcagcccgaccatgggaagtccaaagcacaactgataacaatgaccgtggctcagtcaagagtatgggtgcttgttcgatatctataagtgaaatcagcagagcttattctcgaagagatcttaacaatgataacaaaccatctccaacacctcagaagtcaagtcgagttcctagccgccagtctccatcgactccaccttcaaaggcaccttcgatttcatcggtttctggtaaaacaagactgccaagtccgagaggaagtcaatggggagggtatgaagactcaaggagcatactcagtacccggtctgatcgttataggagacatagcattgcagggtcctcaatgagagacgatgagagccttacaagctcacctgcagttccaagttatatggcaccaacacagtccacaaaggccaggtcccacataccaagccccttaggaagtggcacaccagataggagagtggcagggtctgcaaagaaacggcttttgttcccagcatccccagccagtagtaggagacattcagagcctcctaaagtggacataagtgaggctagaaagaatcagcatgcaccaagcaatggaaggcaagtggcttggtgaagagtgcaacaaaagttagattgaataaacatggaagggttatttcaacttgaagttcttgtagtgtggttgtgattatctttttcttcctaggttttatgattattaattataaaagggttacttttttctgggtgagatttagtttattgtttgtggttgacaaacattcttaaaaatcttcaagtttagtttcaattcatgaaatttgt

SEQ ID NO: 364 - protein, 474 aa, Gossypium hirsutum
MGKKGGWLSIVKKALSPESKKSQHQTPKPKKKWFGKSKNLSPVSVPEETEVITEDAKLKEAENEQSKHAYSVALATAVAAEAAVAAAQAAAEVVRLTSQPRHLGKSKEEIAAIRIQTAFRGYLARRALRALRGLVRLKSLIRGQSVKRQATTTLRCMQTLARLQSEISARRIRMSEENQALQRQLQQKCQKELEKLRAPMREDWNDSTQSKEQIEARQQNKQGATMKRERALAYAYCHQRSWKNCSRSVNQTFMDPSNSHWGWSWLERWMAARPWEVQSTTDNNDRGSVKSMGACSISISEISRAYSRRDLNNDNKPSPTPQKSSRVPSRQSPSTPPSKAPSISSVSGKTRLPSPRGSQWGGYEDSRSILSTRSDRYRRHSIAGSSMRDDESLTSSPAVPSYMAPTQSTKARSHIPSPLGSGTPDRRVAGSAKKRLLFPASPASSRRHSEPPKVDISEARKNQHAPSNGRQVAW

SEQ ID NO: 365 - DNA, 1904 bp, Zea mays; identical to SEQ ID NO: 352

SEQ ID NO: 366 - protein, 311 aa, Zea mays
MTRVQTQIYSRRVKLEEEKQALQRQLQLKHQRELEKMKIDEDWDHSHQSKEQIEANLMMKQEAALRRERALAYAFSHQWRNSGRTITPTFTEPGNPNWGWSWMERWMTARPWESRLAAASDKDPKERAVTKNASTSAVRVPVSRAISIQRPATPNKSSRPPSRQSLSTPPSKTPSASGKARPASPRNSWLYKEDDLRSITSIRSERPRRQSTGGGSVRDDTSLTSTPPLPSYMQSTESARAKSRYRSLLLTEKLEVPERAPLAHSVVKKRLSFPVVEKPSVVPTEKPRERVRRHSDPPKVDPATLKDAPAA

SEQ ID NO: 367 - DNA, 1332 bp, Glycine max
atgcattcactcatcaggtttttttaaaaaaaaaaaattctcatcaatttacacatgcgagaaaatgggtgaaaaatttaatacgaactgaaaaatctttcaaaaatatcgcatattataaacactaaaatgagaaatcaagcatccttattatactatatggatatactcttcactgtttctttatctcttgaatctgttatactttccaactgagacttaggcctgattcctgataagtgcacgagtcctttcctatcttgtcactatcttcagagccatatcctctgcactctcctttctcactgccacgatgatcttttgcataatccaatgatatgctaatgctttgttaagtaagttgcagcgtaaattcttcctcaattttgtcaatggaagtattttgttactgaaataaagtggcatgctatattatgtaacatattttgaatgaatagcattctgcctatgatatgattttcaatcataagtgtaagttccttgatgctgtcaacaaattcagtgtttgatatttgggggcaaaaaatatttggcagcaaaactggaagaactcgtctagatctgtaaatccaatgtttatggatccaactaatccgagctggggttggagctggttggaacgatggatggcagcccgaccttgggagagccgtagccatatggataaagagttgaatgaccactcctccataagaagctcaagccgcagcattaccggtggagaaatcagcaagtcatttgctcgtttccagctcaattcggaaaagcactctccaacagccagccagaatcctggctcccctagctttcagtccactccttccaagccagcttcatcatctgctaagaaaccaaagaaggtaagtccaagcccaaggggcagctgggttatggacgaggactccaaaagcttggtcagtgtacactctgaccggttccggaggcactccattgccggttcatcggtgagagatgacgagagccttgctagctctccagcagttccaagctacatggtgccaactcaatctgcaaaagccaagtccaggacacaaagtccattagcctcagaaaatgcaaaagcagagaaaggttcctttgggagtgcaaagaagcggctttctttcccagcttcacctgccaggccaaggcgccattcaggtccaccaaaggttgaaagcagcagcttaaatgcagagttagctgtggacaagggtgtggacagttgatcatacaagtaaaaggatggaaaagcattaaagtaggattgaaaatatatcactgaagaaataaaacaaaaagagtttattt

SEQ ID NO: 368 - protein, 218 aa, Glycine max
MFMDPTNPSWGWSWLERWMAARPWESRSHMDKELNDHSSIRSSSRSITGGEISKSFARFQLNSEKHSPTASQNPGSPSFQSTPSKPASSSAKKPKKVSPSPRGSWVMDEDSKSLVSVHSDRFRRHSIAGSSVRDDESLASSPAVPSYMVPTQSAKAKSRTQSPLASENAKAEKGSFGSAKKRLSFPASPARPRRHSGPPKVESSSLNAELAVDKGVDS

SEQ ID NO: 369 - protein, 445 aa, Arabidopsis thaliana
MGKKAKWFSSVKKAFSPDSKSKQKLAEGQNGVISNPPVVDNVRQSSSSPPPALAPREVRVAEVIVERNRDLSPPSTADAVNVTATDVPVVPSSSAPGVVRRATPTRFAGKSNEEAAAILIQTIFRGYLARRALRAMRGLVRLKLLMEGSVVKRQAANTLKCMQTLSRVQSQIRARRIRMSEENQARQKQLLQKHAKELAGLKNGDNWNDSIQSKEKVEANLLSKYEATMRRERALAYSYSHQQNWKNNSKSGNPMFMDPSNPTWVPRKNKSNSNNDNAASVKGSINRNEAAKSLTRNGSTQPNTPSSARGTPRNKNSFFSPPTPSRLNQSSRKSNDDDSKSTISVLSERNRRHSIAGSSVRDDESLAGSPALPSYMVPTKSARARLKPQSPLGGTTQENEGFTDKASAKKRLSYPTSPALPKPRRFSAPPKVESGGVTVTNGAGS

SEQ ID NO: 370 - DNA, 1806 bp, Zea mays
gagccgcggaggagcagcggcgcatcgcaacactaaccaaagtcctcctctccaggtgccgagccagggtgactgttccgaggagcgtggcgtggacccatggggaagaagggcaagtggttcggtgccgtcaagaaggtcttcagccccgaatccaaggagaagaaagaggagaggctaaggaggaaatcagcagctagcaacccagcaccggtagatctgaccccatctacctccctggaagtcaatgtttcggtgccaccccctccggctcctcctccagttcctcgccagaccgacgaggtcagggtccccgaagccgagcaggagcagagcaagcatgtcaccctggaggaggcccctgctgctgctgctgccccagcacaggcgtcggtgctgccacctggtgcgccaaccgaagagctcgccgcaatcaagatccagaccgccttccgaggttacctggcaaggagggcactaagagcactacgaggccttgtacgattgaagtcattggttgagggtaattcagttaagcgtcaatctgcaagcactctgcgctgtatgcaaactctatcgcgggtgcagtcacaaatacgatctaggagagcaaagatgtccgaggagaaccaggccctccaacgccagctcctacttaaacaggaactggagaatttcagaatgggtgagaactgggacgacagcactcaatccaaggagcaaatcgaggcaagcctaataagcaggcaagaggcagcgataagaagagaaagagctcttgcatatgcattttcacatcagtggaagagcacatcaagatctgcgaacccaatgtttgtagacccaaataacttgcagtggggctggagctggttggagcgctggatggcagcaaaaccttgggagggacgcaatgggaccgacaaggagagcaacattgatcgcggctccgtcaagaatatgagcttgaaccttggagttggagagggtgagatcacaaaagctttcaaccgccgggactcaaagccagagaagccatcaccaccgactccaaaaccggcccgtccagcttccaggcaatccccttcgacgccctctgctagagtggccccaatacctgcgaggaggaaatccagcacgccaaagaatgggctttcacaggtggacgatgacgtgaggagcgtgctcagtgtgcagtctgagcgaccaaggaggcacagcatagccacgacgtcgaccatgcgggacgatgagagcctcgcgagctccccgtcgctcccgagctacatggttcccacagaatctgcgagggccaaatctcgcacagcaacggccaatggcgcagagacgcctgagaaaggaggctctgctggaccagtcaagaagaggttgtctttccaaggtggagctgcggctgcctcaccgatgcgacggcattctggccctcccaaggtggagagcgctgtgaaggacattgctgcgccaccacagcctgaggccttggtagccaatggtggtggaagcaagtgacttgtattgacaagttccaggatgggggagcgggttatggtcttatggagggacatgtttcatccgtgaacagaagttaagagtggtgccggatctacgaatggtttgaattgttttcccgttacaaccacattgtttgctgtataagattcactgtacctgccagttggttccatttgttgttttctgtaaaacaaacatcaatttgtcactagaatctgtgatgcttgtatgtaaacaggtcctctatttatgtgagccatatatttcattttc

SEQ ID NO: 371 - protein, 476 aa, Zea mays
MGKKGKWFGAVKKVFSPESKEKKEERLRRKSAASNPAPVDLTPSTSLEVNVSVPPPPAPPPVPRQTDEVRVPEAEQEQSKHVTLEEAPAAAAAPAQASVLPPGAPTEELAAIKIQTAFRGYLARRALRALRGLVRLKSLVEGNSVKRQSASTLRCMQTLSRVQSQIRSRRAKMSEENQALQRQLLLKQELENFRMGENWDDSTQSKEQIEASLISRQEAAIRRERALAYAFSHQWKSTSRSANPMFVDPNNLQWGWSWLERWMAAKPWEGRNGTDKESNIDRGSVKNMSLNLGVGEGEITKAFNRRDSKPEKPSPPTPKPARPASRQSPSTPSARVAPIPARRKSSTPKNGLSQVDDDVRSVLSVQSERPRRHSIATTSTMRDDESLASSPSLPSYMVPTESARAKSRTATANGAETPEKGGSAGPVKKRLSFQGGAAAASPMRRHSGPPKVESAVKDIAAPPQPEALVANGGGSK

SEQ ID NO: 372 - DNA, 1703 bp, Glycine max
aaaccatcctctcttagcatttggcaagatctgatttccctcttcacaaggagagaaatagaaaggcatatgatcttcttcaagttgcaatctttttagagagagagggttagaagaacaacatacttgagatctgtcactttgtttgagttcagatcttcaaagtttccttccttgttcttttggtgcaaaggatcaaattaaggaatgccaaatggggaggaaggggaattggttttccagtgtgatgaaagctctcagtcctgactcaaaggagaagaaagaacagaaatcaagtaaatctaagaagaaatggtttgggaagcaaaaattggagacttcagtctcatactcagaagctcataaagcaccaccaccaccgcgacctattcctccaccagaagcgattaaattaactgatattgaaaatgaaatcagtcatgatcacgactatgttgttgaagttgcaactgccatggatgccgaggaacctgttccttctgttcagatagaacctgttagggttgaagctgccccaattgctcattatgctggtaaaccaaaggatgaagtggcagctatcaaaattcaaacagcttttcgtggatacttggcaagaagagcattgcgggctttaagggggctggtcaggttgaaattattgatggaagggccagttgttaaacgccaagccacaagtaccctccactctatgcagacattatctcgcttgcagtctcagattcgttcaaggaggatcagaatgttagaggagaatcaggctctgcagagacagctcttacagaagcatgcaagagagcttgagagcttgcggatgggagaggaatgggatgacagcctacaatcaaaagaacaaatcgaagccaagttacttagcaagtatgaagctactacgagaagagaaagagcgctggcttatgcattcactcatcagcaaaattggaagaactcatctagatctgtaaatccaatgttcatggatccaaccaatccaagctggggttggagctggttggaacgatggatggcagcccgaccttgggagagccgtagccatatggataaagagttgaatgaccactcatccgtaagaagctcaagccgcagtattaccggtggagaaatcagcaagtcatttgctcgtttccagctcaatttggaaaagcactctccaacagcctgccagaatcctggctcacctagctttcagtccactccttccaagccagcttcaatatctgctaagaaaccaaagaaggtaagtccaagcccaaggggcagctgggttacagacgaggactccaaaagcttggtcagtgtacagtcagaccggttccggaggcactccattgccggttcattggtgagagatgatgagagccttgctagctctccagcagttccaagctacatggtgccaactcaatctgcaaaagccaagtccaggacacaaagtccattagccccagaaaatggaaaagcagagaaaggttcctttgggagtgcgaagaagcggctttctttcccagcttcacctgccaggccaaggcgccattcaggtccaccaaaggtagaaagcagcagcttaaatgcagagttagctgtggacaagggtgtggacagttgatcatacaagtaaaaggatggaaaaacattaaagtaggattgaaaatatatcactg

SEQ ID NO: 373 - protein, 477 aa, Glycine max
MGRKGNWFSSVMKALSPDSKEKKEQKSSKSKKKWFGKQKLETSVSYSEAHKAPPPPRPIPPPEAIKLTDIENEISHDHDYVVEVATAMDAEEPVPSVQIEPVRVEAAPIAHYAGKPKDEVAAIKIQTAFRGYLARRALRALRGLVRLKLLMEGPVVKRQATSTLHSMQTLSRLQSQIRSRRIRMLEENQALQRQLLQKHARELESLRMGEEWDDSLQSKEQIEAKLLSKYEATTRRERALAYAFTHQQNWKNSSRSVNPMFMDPTNPSWGWSWLERWMAARPWESRSHMDKELNDHSSVRSSSRSITGGEISKSFARFQLNLEKHSPTACQNPGSPSFQSTPSKPASISAKKPKKVSPSPRGSWVTDEDSKSLVSVQSDRFRRHSIAGSLVRDDESLASSPAVPSYMVPTQSAKAKSRTQSPLAPENGKAEKGSFGSAKKRLSFPASPARPRRHSGPPKVESSSLNAELAVDKGVDS

SEQ ID NO: 374 - DNA, 1475 bp, Gossypium hirsutum
attattttcaatgcaatttaagagttttatttattttatgttataaattttttaacctctaaatatgatttgaaatgttaattccattggttgtttttggttttgaaggagaatttattgaggaatgggcaaaaaaggaagctggtttactgctgtgaagaaagttctaagccttgaacccaacaaagaagagaagattcaaaaatccaagaaaaatggggttaaattacctgagaagatcaaaggaagcaaacgtgacaactggttcgctccggccaccaccatggtgaccggcgcgttggttcgccttactttgtcgccacactacttgggaaaatcaatggaggaaatagctactgttaagattcaaactgtgtttcgaggatacctggcgaggaaggcattgcgagatttgagagggttagagaggttgaaatcattgatacaagggcaatccatgaaacgacaagccactattacgttacgatgcatgcggacacttgctcgagtgcagtcccaaactcgaacaaggcaactcagagtgtctgaacaaaaccgagcacttcaaaagcatcttcaaactaaatacgaaaaacagttgcaaaattccaaatcttacatgggagaagattggaatgtaagtactaagtctaaagagcaaatgcaagcaaaacaacaatatagacaagtagcagccatgcgaagggagagagctttagcttactcatttactcatcagcgatcctggaaggtcacttgtagatcgatgaatcacacatctatggatccatttaatcctaaatggagctggagttggttagagcgatggatgtcaactcgaccatgggagattcaaaatgcaccggataacaatgatcatggcccaagtaagagtgttggtgctgagataaccaaagctaagtctcaaagtgatgttaacaatgatcacaataaacaatcttcaacaccggcaaaaccgattcgacctccgaaccgtaggtcctcttcgactccaccgtctaaaacgcattctatttctagcaagaagggattggaaagccccagtccgacacgaattcagttgcctgattgttacaagaggcatagcatcggaggcttatcattggagagagacgatgaggtctttgcaaactcaccacctaataataaaataccggcacgttcgtcatcaaaggaccggtctcgaccaccgagcattaatagaaatccagttaatactaggagacattctggtcctccgaaagttgatattttttccaactaaggaagaaatgccaaacaatgacaaaggcaggtagtttatgaagcatagacactttagtcgcgagtgccggccacatgtttaatattgaaatggctccgacacaatcaaatgtgtgttggttatatgacgatatattttttcaaaaaatcaaatactatcagaaaaaaatataaagaaagattaattggat

SEQ ID NO: 375 - protein, 386 aa, Gossypium hirsutum
MGKKGSWFTAVKKVLSLEPNKEEKIQKSKKNGVKLPEKIKGSKRDNWFAPATTMVTGALVRLTLSPHYLGKSMEEIATVKIQTVFRGYLARKALRDLRGLERLKSLIQGQSMKRQATITLRCMRTLARVQSQTRTRQLRVSEQNRALQKHLQTKYEKQLQNSKSYMGEDWNVSTKSKEQMQAKQQYRQVAAMRRERALAYSFTHQRSWKVTCRSMNHTSMDPFNPKWSWSWLERWMSTRPWEIQNAPDNNDHGPSKSVGAEITKAKSQSDVNNDHNKQSSTPAKPIRPPNRRSSSTPPSKTHSISSKKGLESPSPTRIQLPDCYKRHSIGGLSLERDDEVFANSPPNNKIPARSSSKDRSRPPSINRNPVNTRRHSGPPKVDIFSN

SEQ ID NO: 376 - protein, 500 aa, Oryza sativa
MGKKGKWFGAVKKVFSPESKEKKEERLRRKLAASNPNPPDLTPSASLEVNVSVPPPPPPPPVQQIEEVKVPEVEQEQSKHVTVEAVPEAVPVPAQTSSLPPGVSREEQAAIKIQTAFRGYLLSENSSWLFISSAAFIYHCVGANITKARRALRALRGLVRLKSLVEGNSVKRQAASTLRCMQTLARVQSQIRSRRLKMSEENQALQRQLLLKQELESLRMGEQWDDSTQSKEQIEASLISRQEAAVRRERALAYAFSHQWKSTSRSVNPMFVDPNNPQWGWSWLERWMAAKPWEGRAGTDKESNLDRASAKSASLNLGEGEITKAFNRRGSKPDKSSPTTPKLTRPASRQSPSTPSAKVSPIFAKKKSATPKNGLSQVDDDAKSVFSVQSERPRRHSIATSTVRDDESLASSPSVPSYMAPTKSARAKLRLQGSAVTDGAETPPEKVASVGSVKKKLSFQAGMVPPSPMRRHSGPPKVEVVKDIAEPPQPEALVINGGSK

SEQ ID NO: 377 - protein, 430 aa, Arabidopsis thaliana
MGKSWFSAVKKALSPEPKQKKEQKPHKSKKWFGKSKKLDVTNSGAAYSPRTVKDAKLKEIEEQQSRHAYSVAIATAAAAEAAVAAAQAAAEVVRLSALSRFPGKSMEEIAAIKIQTAFRGYMARRALRALRGLVRLKSLVQGKCVRRQATSTLQSMQTLARVQYQIRERRLRLSEDKQALTRQLQQKHNKDFDKTGENWNDSTLSREKVEANMLNKQVATMRREKALAYAFSHQNTWKNSTKMGSQTFMDPNNPHWGWSWLERWMAARPNENHSLTPDNAEKDSSARSVASRAMSEMIPRGKNLSPRGKTPNSRRGSSPRVRQVPSEDSNSIVSFQSEQPCNRRHSTCGSIPSTRDDESFTSSFSQSVPGYMAPTQAAKARARFSNLSPLSSEKTAKKRLSFSGSPKTVRRFSGPPKLESNVTKKDTNLA

SEQ ID NO: 378 - protein, 461 aa, Arabidopsis thaliana
MGKKAKWFSSVKKAFSPDSKKSKQKLAEGQNGVISNPPVVDNVRQSSSSPPPALAPREVRVAEVIVERNRDLSPPSTADAVNVTATDVPVVPSSSAPGVVRRATPTRFAGKSNEEAAAILIQTIFRGYLARRALRAMRGLVRLKLLMEGSVVKRQAANTLKCMQTLSRVQSQIRARRIRMSEENQARQKQLLQKHAKELAGLKNGDNWNDSIQSKEKVEANLLSKYEATMRRERALAYSYSHQQNWKNNSKSGNPMFMDPSNPTWGWSWLERWMAGRPLESSEKEQSNSNNDNAASVKGSINRNEAAKSLTRNGSTQPNTPSSARGTPRNKNSFFSPPTPSRLNQSSRKSNDDDSKSTISVLSERNRRHSIAGSSVRDDESLAGSPALPSYMVPTKSARARLKPQSPLGGTTQENEGFTDKASAKKRLSYPTSPALPKPRRFSAPPKVESGGVTVTNGAGS

SEQ ID NO: 379 - protein, 474 aa, Oryza sativa
MGKKGNWFSAVKKVFSSSDPDGREAKIEKADKSRSRRKWPFGKSKKSDPWTSTVAVPTSTAPPPQPPPPPPTHPIQPQPEEIKDVKAVETDSEQNKHAYSVALASAVAAEAAAVAAQAAAEVVRLTTATTAVPKSPVSSKDELAAIKIQTAFRGYLARRALRALRGLVRLKSLVDGNAVKRQTAHTLHCTQTMTRVQTQIYSRRVKMEEEKQALQRQLQLKHQRELEKMKIDEDWDHSHQSKEQWKNSGRTITPTFTDQGNPNWGWSWMERWMTSRPWESRVISDKDPKDHYSTKNPSTSASRTYVPRAISIQRPATPNKSSRPPSRQSPSTPPSRVPSVTGKIRPASPRDSWLYKEDDLRSITSIRSERPRRQSTGGASVRDDASLTSTPALPSYMQSTESARAKSRYRSLLTDRFEVPERVPLVHSSIKKRLSFPVADKPNGEHADKLMERGRRHSDPPKVDPASLKDVPVS

SEQ ID NO: 380 - protein, 495 aa, Zea mays
MGKRGKWFSAVKKVFSSSDPDGKEAKADKSKSKRRWPFGKSKHSEPSISTVPGTAPAVAPLPSPPATQPHSLEIKDVNPVETDSEQNKHAYSVALASAVAAEAAAVAAQAAAEVVRLTAVTTAAPKMPVSSREELAATKIQTAFRGYLARRALRALRGLVRLKSLVDGNAVKRQTAHTLQCTQAMTRVQTQIYSRRVKLEEEKQALQRQLQLKHQRELEKMKIDEDWDHSHQSKEQIEANLMMKQEAALRRERALAYAFSHQWRNSGRTITPTFTEPGNPNWGWSWMERWMTARPWESRLAAASDKDPKERAVTKNASTSAVRVPVSRAISIQRPATPNKSSRPPSRQSLSTPPSKTPSASGKARPASPRNSWLYKEDDLRSITSIRSERPRRQSTGGGSVRDDTSLTSTPPLPSYMQSTESARAKSRYRSLLLTEKLEVPERAPLAHSVVKKRLSFPVVEKPSVVPTEKPRERVRRHSDPPKVDPATLKDAPAA

SEQ ID NO: 381 - DNA, 1497 bp, Sorghum bicolor
atgggtaagaaaggaaagtggtttagtgcggtgaagaaagtcttcagctcctctggtacagatggaaaggaagcaaaggctgagaaagcagacaagtcaaaatccaagaggagatggccattcggaaaaacgaagaagcactccgagccttcgatctcaacggtggcagggactgctccggtagctccgttgccatcaccaccaccaactcagccccactctctggagattaaagatgtcaatccacttgaaacagacagtgagcagaacaagcatgcctactctgttgcgcttgcatctgctgtcgctgctgaagctgcagcggttgctgcccaggctgctgcggaggttgtccgcctcacagcagttaccacggctgcaccaaaaatgcctgttagttcaatggaagaacttgctgccaccaagattcagactgccttcaggggttatctggcaaggagagcattgcgggcactaagagggctagttagattgaagtcgcttgttgatggaaatgctgtcaaacgccaaaccgctcacaccttgcaatgcacacaaacaatgacaagagttcaaactcaaatctattctagaagggtgaagttggaggaggagaaacaggctcttcaaaggcagctccaattgaaacatcaaagagaacttgagaaaatgaagattgatgaagactgggatcacagccatcaatccaaagagcaaattgaggccaaccttatgatgaaacaggaagctgcaatgagacgagaaagagcccttgcatatgcattttctcaccagtggaggacttctggtcgaactataacccctacttttacggaacctgggaaccctaactggggctggagctggatggaacgctggatgaccgctagaccttgggagagccgattggtggcatcagacaaggatcctaaagaacgtgctctgacaaagaatccaagcaccattactgttcaagccgcatctgtaccccgtgccatctcaatccagagaccagctacaccaaacaagtcaagccggccaccaagccggcagtcaccttcaactccaccatcgaaggccccatcaacctcaggaaagaccaggccagcaagtccaaggggcaattggctgtacaaggaggatgacctgaggagcatcacaagcatccgctctgagcgcccaaggaggcagagcacaggtggaggaggctcagtccgggatgatgcaagcctgacgagcacaccacctctccccagttacatgcaatcgacagagtctgcaagggcgaagtctcgataccgcagtctactgactgagaagcttgaggttcctgagagagcacctttggtccactctgttgttaagaagcgcctgtcgttccctgtcgtcgataagccaagtgttgtgccgacagataagccaaaggaaagagtgagacgccattcagatcctccgaaggtcgatcctgcaacactgaaggatgtccctgctgcttga

SEQ ID NO: 382 - protein, 498 aa, Sorghum bicolor
MGKKGKWFSAVKKVFSSSGTDGKEAKAEKADKSKSKRRWPFGKTKKHSEPSISTVAGTAPVAPLPSPPPTQPHSLEIKDVNPLETDSEQNKHAYSVALASAVAAEAAAVAAQAAAEVVRLTAVTTAAPKMPVSSMEELAATKIQTAFRGYLARRALRALRGLVRLKSLVDGNAVKRQTAHTLQCTQTMTRVQTQIYSRRVKLEEEKQALQRQLQLKHQRELEKMKIDEDWDHSHQSKEQIEANLMMKQEAAMRRERALAYAFSHQWRTSGRTITPTFTEPGNPNWGWSWMERWMTARPWESRLVASDKDPKERALTKNPSTITVQAASVPRAISIQRPATPNKSSRPPSRQSPSTPPSKAPSTSGKTRPASPRGNWLYKEDDLRSITSIRSERPRRQSTGGGGSVRDDASLTSTPPLPSYMQSTESARAKSRYRSLLTEKLEVPERAPLVHSVVKKRLSFPVVDKPSVVPTDKPKERVRRHSDPPKVDPATLKDVPAA

SEQ ID NO: 383 - DNA, 1818 bp, Panicum virgatum
gaggaaaatgtcgggctgcttgcccttccttgccttttggcttgcagccgagacattgaagacacagtaatagaacacaaaagaatgggtaagaagggaaagtggtttagtgctgtgaagaaagtcttcggctcctccgatcctgatggaaagcaagcaaaggctgagaaggcggacaagtcaaaatccaggaggagatggccatttggaaagtcgaggcactctgatccttctgcctcaacggtgtcagggactgctccagtagctcctttgccgccgccgccaccaatacaacttactcagccacactctcaggagattaaagatgtcaagccagttgaaacagacagtgagcagaacaagcatgcatactctgttgcccttgcatctgctgttgctgctgaagctgcagcagttgctgcccaggccgctgctgaggttgtccgcctcacagcagttactacggcagcaccaaaaatgcctgttacttcaagggaagaacttgcggccatcaagattcagaccgccttcagaggttatctggcaaggagagcattgcgcgcactaagagggctagttagattgaagtcacttgttgatggacatgccgtcaagcgccaaactgctcatactttgcattgcacacaaacgatgacaagagttcaagctcaaatctactctagaagggtgaaattggaggaggaaaaacaggctcttcaaaggcagctccaattgaaacatcaaagggaacttgagaaaatgaagattgatgaagactgggatcacagccatcaatccaaagaacaaattgaggccagcctagttatgaaacaagaagctgcgctaagacgagaaagagcactcgcatatgctttttctcatcagtggagaaattctggtcgaactataaccccaactttcacagaacctggtaatcctaactggggctggagctggatggaacgctggatgacagcaagaccttgggagagccgattggcagcatcagacaaggatcctaaagagcgttctctgacaaagaattccagcaccagtgctgttcgaatgtctgtaccccgtgccatctcaatccagaggccagcaacaccaaacaagtcaagccgtccaccaagccggcaatcaccttcaacaccgccatcgaaggcaccatctacctcaggaaagaccaggccggcaagtccaaggagcagctggctgtacaaggaagatgacctgaggagcatcacaagcatacgctctgaacgcccaaggaggcagagcataggtggaggctcggtccgggatgatgcaagcctgactagcacaccacctctccccagttatatgcagtcgacagagtctgcgagagcaaagtctcgataccgcagcttattgactgagaaacttgagctttcagagagggcacctctggcccattcagttgttaagaagcgcctctccttcccagtcattgacaaaccgagcggtccaccggcagataagccaaaggaaagggtgagacgccattcagaccctccgaaagtcgatccggcaacactgaaggatgctcctgttgcctgatcaggcccttgtgattgttaggtttcatgctgttttaactccatgatgaaatttctaagattgttttctctgtgtaatgtatgatctgtccgggttgatttgagaattgagacaattctaactgtgtttgcagacatggttttctccctgtagattgacacgtgtgatgctaacagtgtgtgctgttggctttcaatgtaccatataacggtttttgacagactttcttaacgtgtg

SEQ ID NO: 384 - protein, 498 aa, Panicum virgatum
MGKKGKWFSAVKKVFGSSDPDGKQAKAEKADKSKSRRRWPFGKSRHSDPSASTVSGTAPVAPLPPPPPIQLTQPHSQEIKDVKPVETDSEQNKHAYSVALASAVAAEAAAVAAQAAAEVVRLTAVTTAAPKMPVTSREELAAIKIQTAFRGYLARRALRALRGLVRLKSLVDGHAVKRQTAHTLHCTQTMTRVQAQIYSRRVKLEEEKQALQRQLQLKHQRELEKMKIDEDWDHSHQSKEQIEASLVMKQEAALRRERALAYAFSHQWRNSGRTITPTFTEPGNPNWGWSWMERWMTARPWESRLAASDKDPKERSLTKNSSTSAVRMSVPRAISIQRPATPNKSSRPPSRQSPSTPPSKAPSTSGKTRPASPRSSWLYKEDDLRSITSIRSERPRRQSIGGGSVRDDASLTSTPPLPSYMQSTESARAKSRYRSLLTEKLELSERAPLAHSVVKKRLSFPVIDKPSGPPADKPKERVRRHSDPPKVDPATLKDAPVA

SEQ ID NO: 385 - DNA, 2185 bp, Panicum virgatum
gggctcagggctttcggtggctgcctgcttgcttgcttgcttgctttagaggtggaagcttgcccttctcgcggtaaaatcggatcttttggggttttgcgcgccgctatttgattcttcttggctggcttcgcctgtggctttgttttgggggtttgctgggttggtttcttcgcgattgtggacgagggggtgcggtgggcagctgcgagagtttctctgggtctggggcaaatacactcttccggtctccctgtcgtttgcgattcgaccttctggtgagtttttgcgccagctaaacgatcgatggagttcaaatgtcgaagggtaggaagcgccacacgaagcttgcttgttgtgcaaaacaggcgcctttcttttgcttgcagccgagacattgaagacacagtaatagaacacaaaagaatgggtaagaagggaaagtggtttagtgctgtgaagaaagtcttcggctcctccgatccagatggaaagcaagcaaaggctgagaaggcggacaagtcaaaatccaggaggagatggccatttggaaagtcgaggcactctgatccttctgcctcaacggtgtcagggactgctccagtagctcctttgccgccgccgccaccaatacaacttactcagccacactctcaggagattaaagatgtcaagccagttgaaacagacagtgagcagaacaagcatgcatactctgttgcccttgcatctgctgttgctgctgaagctgcagcagttgctgcccaggccgctgctgaggttgtccgcctcacagcagttactacggcagcaccaaaaatgcctgttacttcaagggaagaacttgcggccatcaagattcagaccgccttcagaggttatctggcaaggagagcattgcgcgcactaagagggctagttagattgaagtcacttgttgatggacatgccgtcaagcgccaaactgctcatactttgcattgcacacaaacgatgacaagagttcaagctcaaatctactctagaagggtgaaattggaggaggaaaaacaggctcttcaaaggcagctccaattgaaacatcaaagggaacttgagaaaatgaagattgatgaagactgggatcacagccatcaatccaaagaacaaattgaggccagcctagttatgaaacaagaagctgcgctaagacgagaaagagcactcgcatatgcgttttctcatcagtggagaaattctggtcgaactataaccccaactttcacagaacctggtaatcctaactggggctggagctggatggaacgctggatgacagcaagaccttgggagagccgattggcagcatcagacaaggatcctaaagagcgttctctgacaaagaattccagcaccagtgctgttcgaatgtctgtaccccgtgccatctcaatccagaggccagcaacaccaaacaagtcaagccggccaccaagccggcaatcaccttcaacaccgccatcgaaggcaccatctacctcaggaaagaccaggccggcaagtccaaggagcagctggctgtacaaggaagatgacctgaggagcatcacaagcatacgctctgaacgcccaaggaggcagagcataggtggaggctcggtccgggatgatgcaagcctgactagcacaccacctctccccagttatatgcagtcgacagagtctgcgagagcaaagtctcgataccgcagcttattgactgagaaacttgagctttcagagagggcacctctggcccattcagttgttaataagcgcctctccttcccagtcattgacaaaccgagccgtccaccggcagataagccaaaggaaagggtgagacgccattcagaccctccgaaagtcgatccggcaacactgaaggatgctcctgttgcctgatcaggcccttgtgattgttaggtttcatgctgttttaactccatgatgaaatttctaagattgttttctctgtgtaatgtatgatctgtccgggttgatttgagaattgagacaattctaactgtgtttgcagacatggttttctccctgtagattgacacgtgtgatgctaacagtgtgtgctgttggctttcaatgtaccatataacggtttttgacagactttcttaacgtgtgaaaactgcaatatttagccattccg

SEQ ID NO: 386 - protein, 498 aa, Panicum virgatum
MGKKGKWFSAVKKVFGSSDPDGKQAKAEKADKSKSRRRWPFGKSRHSDPSASTVSGTAPVAPLPPPPPIQLTQPHSQEIKDVKPVETDSEQNKHAYSVALASAVAAEAAAVAAQAAAEVVRLTAVTTAAPKMPVTSREELAAIKIQTAFRGYLARRALRALRGLVRLKSLVDGHAVKRQTAHTLHCTQTMTRVQAQIYSRRVKLEEEKQALQRQLQLKHQRELEKMKIDEDWDHSHQSKEQIEASLVMKQEAALRRERALAYAFSHQWRNSGRTITPTFTEPGNPNWGWSWMERWMTARPWESRLAASDKDPKERSLTKNSSTSAVRMSVPRAISIQRPATPNKSSRPPSRQSPSTPPSKAPSTSGKTRPASPRSSWLYKEDDLRSITSIRSERPRRQSIGGGSVRDDASLTSTPPLPSYMQSTESARAKSRYRSLLTEKLELSERAPLAHSVVNKRLSFPVIDKPSRPPADKPKERVRRHSDPPKVDPATLKDAPVA

SEQ ID NO: 387 - DNA, 1812 bp, Panicum virgatum
agaggtccgtgcggtgggcggtggcttaccagagttaggtccttggcgccttcagtcgggtgaggaaggcttgcagccgagacattgaagacacagtaatagaacacaaaagaatgggtaagaagggaaagtggtttagtgctgtgaagaaagtcttcggctcctccgatcctgatggaaagcaagcaaaggctgagaaggcggacaagtcaaaatccagtaggagatggccatttggaaagtcgaggcactctgatccttctgcctcaacggtgtcagggactgctccagtagctcctttgccgccgccgccaccaatacaacttactcagccacactctcaggagattaaagatgtcaagccagttgaaacagacagtgagcagaacaagcatgcatactctgttgcccttgcatctgctgttgctgctgaagctgcagcagttgctgcccaggccgctgctgaggttgtccgcctcacagcagttactacggcagcaccaaaaatgcctgttacttcaagggaagaacttgcggccatcaagattcagaccgccttcagaggttatctggcaaggagagcattgcgcgcactaagagggctagttagattgaagtcacttgttgatggacatgccgtcaagcgccaaactgctcatactttgcattgcacacaaacgatgacaagagttcaagctcaaatctactctagaagggtgaaattggaggaggaaaaacaggctcttcaaaggcagctccaattgaaacatcaaagggaacttaagaaaatgaagattgatgaagactgggatcacagccatcaatccaaagaacaaattgaggccagcctagttatgaaacaagaagctgcgctaagacgagaaagagcactcgcatatgctttttctcatcagtggagaaattctggtcgaactataaccccaactttcacagaacctggtaatcctaactggggctggagctggatggaacgctggatgacagcaagaccttgggagagccgattggcagcatcagacaaggatcctaaagagcgttctctgacaaagaattccagcaccagtgctgttcgaatgtctgtaccccgtgccatctcaatccagaggccagcaacaccaaacaagtcaagccgtccaccaagccggcaatcaccttcaacaccgccatcgaaggcaccatctacctcaggaaagaccaggccggcaagtccaaggagcagctggctgtacaaggaagatgacctgaggagcatcacaagcatacgctctgaacgcccaaggaggcaaagcataggtggaggctcggtccgggatgatgcaagcctgactagcacaccacctctccccagttatatgcagtcgacagagtctgcgagagcaaagtctcgataccgcagcttattgactgagaaacttgagctttcagagagggcacctctggcccattcagttgttaagaagcgcctctccttcccagtcattgacaaaccgagcggtccaccggcagataagccaaaggaaagggtgagacgccattcagaccctccgaaagtcgatccggcaacactgaaggatgctcctgttgcctgatcaggcccttgtgattgttaggtttcatgctgttttaactccatgatgaaatttctaagattgttttctctgtgtaatgtatgatctgtccgggttgatttgagaattgagacaattctaactgtgtttgcagacatggttttctccctgtagattgacacgtgtgatgctaacagtgtgtgctgttggctttcaatgtacc

SEQ ID NO: 388 - protein, 498 aa, Panicum virgatum
MGKKGKWFSAVKKVFGSSDPDGKQAKAEKADKSKSSRRWPFGKSRHSDPSASTVSGTAPVAPLPPPPPIQLTQPHSQEIKDVKPVETDSEQNKHAYSVALASAVAAEAAAVAAQAAAEVVRLTAVTTAAPKMPVTSREELAAIKIQTAFRGYLARRALRALRGLVRLKSLVDGHAVKRQTAHTLHCTQTMTRVQAQIYSRRVKLEEEKQALQRQLQLKHQRELKKMKIDEDWDHSHQSKEQIEASLVMKQEAALRRERALAYAFSHQWRNSGRTITPTFTEPGNPNWGWSWMERWMTARPWESRLAASDKDPKERSLTKNSSTSAVRMSVPRAISIQRPATPNKSSRPPSRQSPSTPPSKAPSTSGKTRPASPRSSWLYKEDDLRSITSIRSERPRRQSIGGGSVRDDASLTSTPPLPSYMQSTESARAKSRYRSLLTEKLELSERAPLAHSVVKKRLSFPVIDKPSGPPADKPKERVRRHSDPPKVDPATLKDAPVA

SEQ ID NO: 389 - DNA, 2087 bp, Panicum virgatum
ggcaccgggagcgtgaccgtcacgagggggcgaagccccggggaagagccggagaggagatcgagagcggcccatcgcccccacaccacgccccacctccggctgcccgcctcccccgccgccgtggtccgcggctgcgggcggggccacgcgcccggctgggggtgaacagcgcgggacggggtcaccgtcgggcggtggggtgggcgaatcgatcctgcgtgcggggttgggctggccgataaaagggggcgcctttggactggcgaggcttgccgccgagacattgaagacacagtaatagaacacaaaaaatgggtaaaaagggaaagtggtttagtgctgtcaagaaagtcttcggctcctctgatccagatggaaaggaagcaaaggttgagaaggcggataagtcaaaatccaggaggagatggccatttggaaagtcgaggcactctgatccttctacctcaatggtgtcagggactgctccagtagctccgttgcctccgccaccaccaatacaacttactcagccacactcccaggagattaaagatgtcaagccagttgaaacagacagtgagcagaacaagcatgcatactctgttgcccttgcatccgctgttgctgctgaagctgctgcagttgctgcccaggccgctgctgaggttgtgcgcctcacagcagttaccacggcagcaccaaaaatgcctgttacttcaagggaagaacttgccgccatcaagattcagactgccttcaggggttatctggcaaggagagcattgcgggcactaagagggctagttagattgaagtcacttgtcgatggaaatgctgtcaagcgccaaacttctcacactttgcattgcacacaaacgatgacaagagttcaaactcaaatctactctagaagggtgaagttggaggaggaaaaacaagctcttcaaaggcagctccaattgaaacatcaaagggaacttgagaaaatgaagattgaagaagactgggatcacagccatcaatccaaagaacaaattgaggccagcctagttatgaaacaagaagctgcactaaaacgagaaagagcacttgcatatgcattttctcaccagtggagaaattctggtcgaactataaccccaactttcacagaacctgggaatcctaactggggctggagctggatggaacgctggatgacagcaagaccttgggagagccgattggcagcatcagacaaggataataaagagcgttctctgacaaagaattccagcagcagtgctgttcgaatgtctgtaccccgtgccatctcaatccagaggccagcaacaccaaacaagtcaagccgtccaccaagccggcagtcaccttcaacaccgccatcgaaggcaccatctacctcaggaaagaccaggccggcaagtccaaggggcagctggctgtacaaggaagatgacctgaggagcatcacaagcatacgctctgaacgcccaaggaggcaaagcataggcggaggctcggtccgggatgatgcaagcctgactagcacaccacctctccccagttatatgcagtcgacagagtctgcgagggcaaagtctcgataccgcagcttgttgactgaaaagcttgaggtttcagagagggcacctctggcccattcggttgttaagaagcgcctctccttccctgtcatcgacaaaccgagcagtccaccggcagataagacaaaggaaagagcgaggcgccattcagaccctccgaaggttgatcctgcaatgatgaaggatgcccctgttgcctgatcaggcccttgtgattgttaggtttcgtgctgttttaactccatgatgtattttctaagttagattgttttctctgcgtaatgtctaatctgtccgggttgatttgagaattgaggcaattctaactgtatttgctgtcatggttttctccctgtagattgatacgtgtgattctaatagtgtatgcccttggctttcaatgtacgatataacggtttttgacagactttcttaacgtgcgaaattgcaatatatatatatatatatatccattcc

SEQ ID NO: 390 - protein, 498 aa, Panicum virgatum
MGKKGKWFSAVKKVFGSSDPDGKEAKVEKADKSKSRRRWPFGKSRHSDPSTSMVSGTAPVAPLPPPPPIQLTQPHSQEIKDVKPVETDSEQNKHAYSVALASAVAAEAAAVAAQAAAEVVRLTAVTTAAPKMPVTSREELAAIKIQTAFRGYLARRALRALRGLVRLKSLVDGNAVKRQTSHTLHCTQTMTRVQTQIYSRRVKLEEEKQALQRQLQLKHQRELEKMKIEEDWDHSHQSKEQIEASLVMKQEAALKRERALAYAFSHQWRNSGRTITPTFTEPGNPNWGWSWMERWMTARPWESRLAASDKDNKERSLTKNSSSSAVRMSVPRAISIQRPATPNKSSRPPSRQSPSTPPSKAPSTSGKTRPASPRGSWLYKEDDLRSITSIRSERPRRQSIGGGSVRDDASLTSTPPLPSYMQSTESARAKSRYRSLLTEKLEVSERAPLAHSVVKKRLSFPVIDKPSSPPADKTKERARRHSDPPKVDPAMMKDAPVA

SEQ ID NO: 391 - DNA, 2233 bp, Panicum virgatum
gagaaaaaaggttgggctgcttgcccttcctttgctttttggtactttctttccgtctccggtttatttttccttcgtcctggatgcgctggtcgcgggtttgatctgaccaagacgtagaggcggtggtagaggtccgtggggtgggcggtggcttgctagagttaggtccttggcgcattcaggcgggtgaggaaggtgaggggctcagggctttcggtggttgcttgcttgcttgcttgctttgcctttctcgcggtaaaatcggatcttttggggttttgcgcgccgctatttgattcttcttggctggcttcgcctgcgcctttgttttggggttttgctgggttggtttcttcgcgattgtggtcgagggcggtgcggcgggtgcctcaggcacagctgcgagggtttctctgggtctggggcaacatccactcttcccgtttgtgattcgaccttctggcttgccgccgagacattgaagacacagtaatagaacacaaaaaatgggtaaaaagggaaagtggtttagtgctgtcaagaaagtcttcggctcctctgatccagatggaaaggaagcaaaggttgagaaggcggataagtcaaaatccaggaggagatggccatttggaaagtcgaggcactctgatccttctacctcaatggtgtcagggactgctccagtagctccgttgcctccgccaccaccaatacaacttactcagccacactcccaggagattaaagatgtcaagccagttgaaacagacagtgagcagaacaagcatgcatactctgttgcccttgcatccgctgttgctgctgaagctgatgcagttgctgcccaggccgctgctgaggttgtgcgcctcacagcagttaccacggcagcaccaaaaatgcctgtaacttcaagggaagaacttgccgccatcaagattcagactgccttcaggggttatctggcaaggagagcattgcgggcactaagagggctagttagattgaagtcacttgtcgatggaaatgctgtcaagcgccaaacttctcacactttgcattgcacacaaacgatgacaagagttcaaactcaaatctactctagaagggtgaagttggaggaggaaaaacaagctcttcaaaggcagctccaattgaaacatcaaagggaacttgagaaaatgaagattgaagaagactgggatcacagccatcaatccaaagaacaaattgaggccagcctagttatgaaacaagaagctgcactaaaacgagaaagagcacttgcatatgcattttctcaccagtggagaaattctggtcgaactataaccccaactttcacagaacctgggaatcctaactggggctggagctggatggaacgctggatgacagcaagaccttgggagagccgattggcagcatcagacaaggataataaagagcgttctctgacaaagaattccagcagcagtgctgttcgaatgtctgtaccccgtgccatctcaatccagaggccagcaacaccaaacaagtcaagccgtccaccaagccggcagtcaccttcaacaccgccatcgaaggcaccatctacctcaggaaagaccaggccagcaagtccaaggggcagctggctgtacaaggaagatgacctgaggagcatcacaagcatacgctctgaacgcccaaggaggcaaagcataggcggaggctcggtccgggatgatgcaagcctgactagcacaccacctctccccagttatatgcagtcgacagagtctgcgagggcaaagtctcgataccgcagcttgttgactgaaaagcttgaggtttcagagagggcacctctggcccattcggttgttaagaagcgcctctccttccctgtcatcgacaaaccgagcagtccaccggcagataagacaaaggaaagagcgaggcgccattcagaccctccgaaggttgatcctgcaatgctgaaggatgcccctgttgcctgatcaggcccttgtgattgttaggtttcgtgctgttttaactccatgatgtattttctatgttagattgttttctctgcgtaatgtctaatctgtccgggttgatttgagaattgaggcaattctaactgtatttgctgtcatggttttctccctgtagattgatacgtgtgattctaatagtgtatgcccttggctttcaatgtacgatataacggtttttgacagac

SEQ ID NO: 392 - protein, 498 aa, Panicum virgatum
MGKKGKWFSAVKKVFGSSDPDGKEAKVEKADKSKSRRRWPFGKSRHSDPSTSMVSGTAPVAPLPPPPPIQLTQPHSQEIKDVKPVETDSEQNKHAYSVALASAVAAEADAVAAQAAAEVVRLTAVTTAAPKMPVTSREELAAIKIQTAFRGYLARRALRALRGLVRLKSLVDGNAVKRQTSHTLHCTQTMTRVQTQIYSRRVKLEEEKQALQRQLQLKHQRELEKMKIEEDWDHSHQSKEQIEASLVMKQEAALKRERALAYAFSHQWRNSGRTITPTFTEPGNPNWGWSWMERWMTARPWESRLAASDKDNKERSLTKNSSSSAVRMSVPRAISIQRPATPNKSSRPPSRQSPSTPPSKAPSTSGKTRPASPRGSWLYKEDDLRSITSIRSERPRRQSIGGGSVRDDASLTSTPPLPSYMQSTESARAKSRYRSLLTEKLEVSERAPLAHSVVKKRLSFPVIDKPSSPPADKTKERARRHSDPPKVDPAMLKDAPVA

SEQ ID NO: 393 - protein, 499 aa, Hordeum vulgare
MAKKGKWFSAVRRVFSSSDPEGKEAKTEKADKPKSRRKWPFGKSKRFDPPTSTVSDITPVAPSPLPLPLPPTQPPQPQPEEIKDVKPVETESEQNKHAYSVALASAVAAEAAAVAAQAAAEVVRLTAVPTATSRAPVCSQEELAAVKIQTAFRGYLARRALRALRGLVRLKSLVDGNAVKRQTAHTLHCTQTMARVQTQIYSRRVKMEEEKQALQRQLQLKHQRELEKMKIDEDWDHSHQSKEQIEASLIMKQEAAVRRERALAYAFSHQWKNSGRTVTPTFTDQGNPNWGWSWMERWMSARPWENRVVSNKDKDTALTKNPSTNAARTFVPRALSIQRPATPSKSSRPPSRQSPSTPPSKNPSVAGKFRPSSPRDSWLYREDDLRSITNIRSERPRRLSTGGGSIQDDASLTSTPALPSYMQSTKSARAKSRYHMVFADKFEVPDRASLVHSSIKKRLSFPAAEKPNVTPADKLKERARRHSDPPKVEPASLKDVHVA

SEQ ID NO: 394 - DNA, 1190 bp, Zea mays
taagagggctagttagattgaagtcgcttgttgatggaaatgctgtcaaacgccaaaccgctcacaccttgcaatgcacacaagcaatgacaagagttcaaactcaaatctactctagaagggtgaagttggaggaggagaaacaggctcttcaaagacaactccaattgaaacatcaaagggaacttgagaaaatgaagattgatgaagattgggatcacagccatcaatccaaagagcaaattgaggccaacctaatgatgaaacaggaagctgcactcaggcgagaaagagcacttgcatatgcattttctcaccagtggaggaattctggtcgaactataacccctacttttacggaacctgggaaccccaactggggctggagctggatggagcgctggatgacagcaagaccatgggagagccggttggcggcggcatcggacaaggaccctaaagaacgtgctgtgacaaagaatgcgagcaccagtgctgttcgagcacctgtatcccgtgccatctcgattcagagaccagcaacaccaaacaagtcgagccgcccaccaagccggcagtcactttcaaccccgccatcgaagaccccgtcagcctcaggaaaggccaggccggcaagtccaaggaacagttggctgtacaaggaggatgacctgaggagcatcacgagcatccgctccgagcgcccaaggaggcagagcacgggtggaggctcggtccgggacgataccagcctgaccagcacaccacctctccccagctacatgcagtcgaccgagtctgcacgggccaagtctcggtaccgcagtctactactgactgagaagcttgaggttcctgagagagcgcctctggcccactccgttgtcaagaagcgcctgtcgttccccgtcgtcgagaagccaagcgttgtgccgacagagaagcccagggaaagagtgaggcgccattccgaccctccgaaggtcgatcctgcgacgctcaaggatgcccctgctgcctgaccagtgaccaggccttatgtgattgttaggtttcgtgctcttttaacaccgtgatgtattatctgagttaggttgctttgttcgtgtcatcgtatgatctgtccgggttgattttgagacagttctaactgtgtttacagacaatgcgtgatgctaaatgtatgtgtg

SEQ ID NO: 395 - protein, 311 aa, Zea mays
MTRVQTQIYSRRVKLEEEKQALQRQLQLKHQRELEKMKIDEDWDHSHQSKEQIEANLMMKQEAALRRERALAYAFSHQWRNSGRTITPTFTEPGNPNWGWSWMERWMTARPWESRLAAASDKDPKERAVTKNASTSAVRAPVSRAISIQRPATPNKSSRPPSRQSLSTPPSKTPSASGKARPASPRNSWLYKEDDLRSITSIRSERPRRQSTGGGSVRDDTSLTSTPPLPSYMQSTESARAKSRYRSLLLTEKLEVPERAPLAHSVVKKRLSFPVVEKPSVVPTEKPRERVRRHSDPPKVDPATLKDAPAA

SEQ ID NO: 396 - protein, 308 aa, Oryza sativa
MTRVQTQIYSRRVKMEEEKQALQRQLQLKHQRELEKMKIDEDWDHSHQSKEQVETSLMMKQEAALRRERALAYAFSHQWKNSGRTITPTFTDQGNPNWGWSWMERWMTSRPWESRVISDKDPKDHYSTKNPSTSASRTYVPRAISIQRPATPNKSSRPPSRQSPSTPPSRVPSVTGKIRPASPRDSWLYKEDDLRSITSIRSERPRRQSTGGASVRDDASLTSTPALPSYMQSTESARAKSRYRSLLTDRFEVPERVPLVHSSIKKRLSFPVADKPNGEHADKLMERGRRHSDPPKVDPASLKDVPVS

SEQ ID NO: 397 - protein, 482 aa, Vitis vinifera
MGKKGNWFSAVKKALSPEPKEKKDKTTPKSKKKWFGKHKNLDPVSSSTENAMPLPAPAPPIEDVKLTEAENEQSKHAYSVALATAVAAEAAVAAAHAAAEVVRLTTVTRFSGKSKEEVAAIKIQTAFRGYLARRALRALRGLVRLKSLIQGQSVKRQATTTLRCMQTLARVQSQIRARRIRMSEENLALQRQLQLKRDKELEKLRASMGDDWDDSVQSKEQIEANLQSKQEAAVRRERALAYAFSHQQTWKNSSKPANPTFMDPNNPHWGWSWLERWMAARPWESRSAMEKELNTDHASLKSTTSRAFSIGEISKAYARRDLNLDKKPSPTAQKPSRPPSRQSPSTPPSKAQSSSSVTGKTKPASPKGSGWGADDDSRSMLSIQSERYRRHSIAGSLVRDDESLASSPAVPSYMASTESTRARSRLPSPLGLEKNGTPEKASGSSAKKRLSFPASPAGPRRHSGPPRVETSSIKAISPAHRG

SEQ ID NO: 398 - protein, 482 aa, Vitis vinifera
MGKKGNWFSAVKKALSPEPKEKKDKTTPKSKKKWFGKHKNLDPVSSSTENAMPLPAPAPPIEDVKLTEAENEQSKHAYSVALATAVAAEAAVAAAHAAAEVVRLTTVTRFSGKSKEEVAAIKIQTAFRGYLARRALRALRGLVRLKSLIQGQSVKRQATTTLRCMQTLARVQSQIRARRIRMSEENLALQRQLQLKRDKELEKLRASIGDDWDDSVQSKEQIEANLQSKQEAAVRRERALAYAFSHQQTWKNSSKPANPTFMDPNNPHWGWSWLERWMAARPWESRSAMEKELNTDHASLKSTTSRAFSIGEISKAYARRDLNLDKKPSPTAQKPSRPPSRQSPSTPPSKAQSSSSVTGKTRPASPKGSGWGADDDSRSMLSIQSEWYRRHSIAGSLVRDDESLASSPAVPSYMASTESTRARSRLPSPLGLEKNGTPEKASGSSAKKRLSFPASPAGPRRHSGPPRVETSSIKAISPAHRG

SEQ ID NO: 399 - protein, 443 aa, Vitis vinifera
MGKRGSWFSALKKALGSSKKKWSEKEKNRDLGVSSHEETVAPSLSPPRTPPPPTAEDVKLTEAENEQSKHAYSVALATAVAAEAAVAAAQAAAEVVRLTTVAHYSGKSKEEIAAIRIQTAFRGYLARRALRALRGLVRLKSLIQGQSVKRQATATLRAMQTLARVQSQIRARRIRMSEENEALQRQLQQKHDKELEKLRTSVKQWDDSPQSKEEVEASLLQKQEAAMRRERALAYAYSHQQMWKQSSKSANATFMDPNNPRWGWSWLERWMAARPWESRSTIDNNDRASVKSTTSPSPGAQKSSRPPSRQSPSTPPSKAPSTSSVTGKAKPPSPRGSAWGGDEDSRSTFSVQSERYRRHSIAGSSIRDDESLASSPSVPSYMAPTRSQSAKAKSRLSSPLGIDNNGTPDKASVGYVKKRLSFSASPAGARRHSGPPRVDASAV

SEQ ID NO: 400 - protein, 479 aa, Vitis vinifera
MGRKGNWLSSVKKALSPEPKEKKDQRADKSKKKWFGKHKYPDPNPSSLETVPGPSLAPPEEVKTIEPDNEHHKHVYSVAATTTMASLDVPETDVEVVEITTLTQSTGKAKEEAAAIKIQTAFRGYLARRALRALRGLVRLQSLIQGTAVKRQAANTLRCMQTLARVQSQICYRRIRMSEENQALQRQLLQKQAKEFEQLKMGEEWDDSLQSKEQIEAGLLNKQGAAMRRERALAYAFSHQQAWKNSSKSTNLLFMDPSNPHWGWSWLERWMAARPWESRSTTDKELNNDQLSIKSGSRSITGGEITKAYARHLLDSSKPSPTASQKPYHPPARQSPSTPPSKAVSSSSAAGKFKPAASPRGNLWGQDDDTKSMVSIQSERFRRHSIAGSSVGDDESLASSPAVPSYMAPTKSAKAKSRLQSPLGLENNGTPEKGSSGIAKKRLSFPASPARPRRHSGPPRVESSSLTEGIVSNGGGTVS

SEQ ID NO: 401 - protein, 474 aa, Oryza sativa
MGKKGKWFGAVKKVFSPESKEKKEERLRRKLAASNPNPPDLTPSASLEVNVSVPPPPPPPPVQQIEEVKVPEVEQEQSKHVTVEAVPEAVPVPAQTSSLPPGVSREEQAAIKIQTAFRGYLARRALRALRGLVRLKSLVEGNSVKRQAASTLRCMQTLARVQSQIRSRRLKMSEENQALQRQLLLKQELESLRMGEQWDDSTQSKEQIEASLISRQEAAVRRERALAYAFSHQWKSTSRSVNPMFVDPNNPQWGWSWLERWMAAKPWEGRAGTDKESNLDRASAKSASLNLGEGEITKAFNRRGSKPDKSSPTTPKLTRPASRQSPSTPSAKVSPIFAKKKSATPKNGLSQVDDDAKSVFSVQSERPRRHSIATSTVRDDESLASSPSVPSYMAPTKSARAKLRLQGSAVTDGAETPPEKVASVGSVKKKLSFQAGMVPPSPMRRHSGPPKVEVVKDIAEPPQPEALVINGGSK

SEQ ID NO: 402 - protein, 474 aa, Oryza sativa
MGKKGKWFGAVKKVFSPESKEKKEERLRRKLAASNPNPPDLTPSASLEVNVSVPPPPPPPPVQQIEEVKVPEVEQEQSKHVTVEAVPEAVPVPAQTSSLPPGVSREEQATIKIQTAFRGYLARRALRALRGLVRLKSLVEGNSVKRQAASTLRCMQTLARVQSQIRSRRLKMSEENQALQRQLLLKQELESLRMGEQWDDSTQSKEQIEASLISRQEAAVRRERALAYAFSHQWKSTSRSVNPMFVDPNNPQWGWSWLERWMAAKPWEGRAGTDKESNLDRASAKSASLNLGEGEITKAFNRRGSKPDKSSPTTPKLTRPASRQSPSTPSAKVSPIFAKKKSATPKNGLSQVDDDAKSVFSVQSERPRRHSIATSTVRDDESLASSPSVPSYMAPTKSARAKLRLQGSAVTDGAETPPEKVASVGSVKKKLSFQAGMAPPSPMRRHSGPPKVEVVKDIAEPPQPEALVINGGSK

SEQ ID NO: 403 - DNA, 1440 bp, Oryza sativa
atggggaggaaaggaaaatggttttctagtgtaaagaaagctcttagccctgattccaaggagaagaaagaccagaaatcaaataaatcgaagaagaaatggtttggcaagcaacaactggattcggattccacttctttagaaaatgttacaatgcgatctcctcctcctcctcaaccagacgaggtgaaattaattgaaaccacaaatgaagagaaccagcatacttactctgttccagttgtcactgctgcagtagctgagcatgctccgattactgttcaaaccaccactgaggtttttcaaccaaccaaggttaataaatatgctggcaaatcaaaggaagaagtggcggcaattaagattcagacagcattccgaggatacatggcaagaagagcattgcgggctctgagagggctgttcaggctcaaatctctgatggaagggcctacgataaaaagacaagcaacccatactctccactgcatgcagactctagctcgggtgcagtcacagatacacacaaggaggattagaatgtcagaagagaaccaggccctacagagacaactcctacatgagcatgcaaaagagtttgaaagcttgcagattggagaggaatgggatgacagtctacagtcaaaggaacagattgaagctaacctgctaaacaagtttgaggcagctgtgagaagggaaagagcactggcttattctttctctcatcagcaagcctggaaaatttcttcacgagctgtaaacccaatgttcatgagtggcaatccatcctggggttggagctggttggaacgatggatggcagcccatccatgggagagccggagcatgacggagaaagaacttaataatgaccactcatctctaaagagtgcgagccgcagcattactggaggggatataagcaaatcttatgctcgctaccagctcaattctgataaactaactccaagagaaagtgaaaggccaaccaaaaccgcgaacctacagttccaatcaactcctaacaagccagctgcttctacagttgctagaaaattgaagtcagccagcccaaggagtggcattgggggcctagatgatgaatctaaaagtgtggtcagtgttcagtcagatcatagtagaaggcatagcattgcaggttcatttgtacgagatgatgagagccttggaagctctccaccacttccaagttacatggtacctacagaatccgcgagagcaaagtccagattacaaaacccattgggggcagagatgaacggagcgcctgaaaaggaaaagggatccttggggtctgccaagaagcggctttcctaccctccctcaccagccaaagcaaggaggtattcaggtcccccgaaattggaaagcagcttaaaagcagaaaacagtgaggctgctggcgagggcatttaa

SEQ ID NO: 404 - protein, 479 aa, Oryza sativa
MGRKGKWFSSVKKALSPDSKEKKDQKSNKSKKKWFGKQQLDSDSTSLENVTMRSPPPPQPDEVKLIETTNEENQHTYSVPVVTAAVAEHAPITVQTTTEVFQPTKVNKYAGKSKEEVAAIKIQTAFRGYMARRALRALRGLFRLKSLMEGPTIKRQATHTLHCMQTLARVQSQIHTRRIRMSEENQALQRQLLHEHAKEFESLQIGEEWDDSLQSKEQIEANLLNKFEAAVRRERALAYSFSHQQAWKISSRAVNPMFMSGNPSWGWSWLERWMAAHPWESRSMTEKELNNDHSSLKSASRSITGGDISKSYARYQLNSDKLTPRESERPTKTANLQFQSTPNKPAASTVARKLKSASPRSGIGGLDDESKSVVSVQSDHSRRHSIAGSFVRDDESLGSSPPLPSYMVPTESARAKSRLQNPLGAEMNGAPEKEKGSLGSAKKRLSYPPSPAKARRYSGPPKLESSLKAENSEAAGEGI

SEQ ID NO: 405 - protein, 467 aa, Zea mays
MGKKGKWFGAVKKVFSPESKEKKEERLRRKSAASNPTPVDLTPSTSLEVNLSVPPPPAPPPVLHQAEEVGVPEAEQEQSKHVAVEEAPAAAPAQASVLPPAVPTQELAAVKIQTAFRGYLARRALRALRGLVRLKSLVEGNSVKRQSASTLRCMQTLSRVQSQISSRRAKMSEENQALQRQLLLKQELENFRIGENWDDSTQSKEQIEASLISRQEAAIRRERALAYAFSHQWKSTSRSVNPMFVDPNNLQWGWSWLERWMAAKPWEGRNGADKESNIDRGSVKSMSLNLGEGEITKAFNRRDSKLEKPSPPTPRPARPTSRHSPLTPSARVAPIPARRKFVTPKNGLSQVDDDARSVLSVQSERPRRHSIATSTVRDDESLTSSPSLPSYMVPTESARAKSRLQGSATANGAETPEKGGSTGPAKKRLSFQGGTVSASPMRRHSGPPKVEIAPPQPEALVVNGGSK

SEQ ID NO: 406 - DNA, 1437 bp, Populus trichocarpa
atggggaggaaaggaaaatggttttctagtgtaaagaaagctcttagccctgatcccaaggagaagacagaccagaaatcaaataaatcaaagaagaaatggtttggaaagcaacaactggattcggattccacttctttagaaaatgtcacaatgctgtctcctcctccccaaccagaagaagtgaaattaattgagacaacagatgaagtgaaccagcatactttccctgttccagttgccactgctgcagtacctgagcctgctccgactactgtccaaaccaatattgaggttgttcaactgaccaaggtaaacaaatatgctggcaaatcaaaggaagaagaggcggcaattaagattcaaacaacattcagaggatacatggccagaagagcattgcgggctctgagagggttggcgaggctcaaatttctgatggaagggcctagaataaaaaggcaagcaacacataccctccgctgcatgcagactctagctcgggtgcagtcacagattcacacaaggaggatcagaatgtcagaagagaaccaggccctacagagacaactcctacagaagcatgccaaagagcttgaaaacttgcggattggagaggaatgggatgacagtctacagtcgaaggaacagattgaagctagcctgctaaacaagtttgaggccgctacgagaagggaaagagcactggcttatgctttctctcatcagcaaactttgaagaattcttcacgatctgcaaaccccatgttcatgaatgggaatccttcctggggttggagctggttggaacgatggatggcagcccatccatgggagagccggagcttgatggagaaagaacacaataacgaccactcatctgtaaagagtgccagccgcagcattactggaggagaaataagcaaatcttatgctcgctaccagctcaattctgataaattaactccaagagaaagtgaaaggccaaccaaaaccacgaacctacagtccccatcaactcctaaaaagccagctgcttctacagttgctagaaaattgaagtcagcaagcccaaggagtaacattgggggcattgaagatgactctagaagcatggtcagtgttcaatcagatcgtagtagaaggcatagcattgctggttcatttgtgcgagatgatgagagcctcggaagctctccagcgcttccaagttacatggtacctacacaatctgcaagagcaaagtccagaatacatagcctattgggagcagaaaaggacgggacaccagaaaaggaaaagggttcctctgggcatacaaagaaacggctttcataccctccatcgccagccaaaggaaggaggtattctggccccccaaagttggaaagcagcttcaatgcaagaaatagcgtggctgctggcgagggaatttaa

SEQ ID NO: 407 - protein, 478 aa, Zea mays
MGRKGKWFSSVKKALSPDPKEKTDQKSNKSKKKWFGKQQLDSDSTSLENVTMLSPPPQPEEVKLIETTDEVNQHTFPVPVATAAVPEPAPTTVQTNIEVVQLTKVNKYAGKSKEEEAAIKIQTTFRGYMARRALRALRGLARLKFLMEGPRIKRQATHTLRCMQTLARVQSQIHTRRIRMSEENQALQRQLLQKHAKELENLRIGEEWDDSLQSKEQIEASLLNKFEAATRRERALAYAFSHQQTLKNSSRSANPMFMNGNPSWGWSWLERWMAAHPWESRSLMEKEHNNDHSSVKSASRSITGGEISKSYARYQLNSDKLTPRESERPTKTTNLQSPSTPKKPAASTVARKLKSASPRSNIGGIEDDSRSMVSVQSDRSRRHSIAGSFVRDDESLGSSPALPSYMVPTQSARAKSRIHSLLGAEKDGTPEKEKGSSGHTKKRLSYPPSPAKGRRYSGPPKLESSFNARNSVAAGEGI

SEQ ID NO: 408 - DNA, 2001 bp, Panicum virgatum
gtcactctcggcactgctcccagctgttgcgacctccgaacatccaaggctcctgcacccctgtcagtcctagctccagccaaaaatcgttggctcccgctgcctgctcctccgccttgcacctcccatgaccttccacgcgacatgattgcattgcaggcccctgcggagctcagctgtcctcccacgccgctgacgccttcttgttgcctccacgctgctgcgctcaaccgaaagggccttcctctctttgcttccgcggaaggatttggcgatttattcatctactaaagttgcatctctcttgtgcgtggtgattgtttcgaggagcgtggagcggagccatggggaagaagggcaagtggttcggcgcggtcaagaaagtgttcagccctgaatccaaggagaagaaggaggagaggcagaggaggaaatcagcagctagcaaccctactccactagatctgaccccgtcgacctccttggaagtcaatgtttcggtgccaccccctccagctcctccggctcttcaccagattaaggaggtcaggatccctgaagctgagcaggagcagagcaagcacatcaccgtagaggaggcccctgctgcccctgcacaggcgtcggtgcttccacctggtgtgccaagtgaagagcttgctgcaatcaagatccagactgccttccgaggttacctggcaaggagggcactgcgagcgctgcggggccttgttcgattgaagtcattggttgagggtgattcagttaggcgtcaatctgcaagcactctgcgctgtatgcagactctatcgcgggtgcagtcacaaatacgttctaggagagcaaagatgtctgaggagaaccaggccctccagcgccagctcctactgaagcaggaactggagaatttcaggatgggtgagaactgggatgacagcactcaatccaaagagcaaatcgaggcgagcctaataagcaggcaagaggcagcgattagaagagaaagagcgcttgcatatgcattttcacatcagtggaagagcacgtcgaggtctgtcaacccaatgtttgtagacccaaacaacttgcagtggggctggagctggctggagcgctggatggctgcaaaaccttgggagggccgcaatgggactgataaggagagcaatgttgaccgtggatccgttaagagcatgagcttgaaccttggagagggtgagatcactaaagctttcaaccgccgggactcaaagccagaaaagccatccccgccaactccaaaactgacccgtccagcctccaggcaatccccttcaacgccctccgctaaagtagcgccaatacctgtgaggagaaaatccgtcacgccaaagaatgggctttcacatgtggatgacgatgcgagaagtgtgttcagtgtgcagtctgagcgaccaaggaggcacagtatagccacctcgactgtgcgggacgatgagagtctcgcaagctccccatcactcccaagttatatggttcccacagaatctgcaagggcgaagtctcgtctccagggatcagcattgaataatggtgcagagacaccagagaaaggaagctctgctggaccggtcaagaaaaggttgtcctttcaaggtggaacagcggctgcctcaccaatgcgacggcattctggtcctcccaaggtggggagtgcggtgaaggatattgttgccccaccacagccagaggccttggtgatcaatggtggaagcaagtgactcatgacaagtaccaggagggtaaagcggacaatgaatatatattttatccatgaagaaaggttaacgtgatatcagctctatgagtgatttgaattgttttccagttacgaccacattgtttgctctataagattcacagtacctgccagttgattccattcgttgtttctgtaaaacaagtaccggttcgtcactagaatcagtgatgtttgtatgtaaacaggtcttctatttatgt

SEQ ID NO: 409 - protein, 471 aa, Panicum virgatum
MGKKGKWFGAVKKVFSPESKEKKEERQRRKSAASNPTPLDLTPSTSLEVNVSVPPPPAPPALHQIKEVRIPEAEQEQSKHITVEEAPAAPAQASVLPPGVPSEELAAIKIQTAFRGYLARRALRALRGLVRLKSLVEGDSVRRQSASTLRCMQTLSRVQSQIRSRRAKMSEENQALQRQLLLKQELENFRMGENWDDSTQSKEQIEASLISRQEAAIRRERALAYAFSHQWKSTSRSVNPMFVDPNNLQWGWSWLERWMAAKPWEGRNGTDKESNVDRGSVKSMSLNLGEGEITKAFNRRDSKPEKPSPPTPKLTRPASRQSPSTPSAKVAPIPVRRKSVTPKNGLSHVDDDARSVFSVQSERPRRHSIATSTVRDDESLASSPSLPSYMVPTESARAKSRLQGSALNNGAETPEKGSSAGPVKKRLSFQGGTAAASPMRRHSGPPKVGSAVKDIVAPPQPEALVINGGSK

SEQ ID NO: 410 - DNA, 2117 bp, Panicum virgatum
gtcactctcgccactgctcccagctgttgcgacttgcgacctccgatcatccaaggctcctgcacccctgtcagtcctagctccagccaaaaatcgttggcttccgctgcctgctcctccgccttgcacctcccatgaccttccacgcgacatgattgcattgcaggcccctgcggagctcagtgtcctcccacgccgctgacgccttcttgttgcctccccgctgctgcgcacaaccgaaagggccttcctctcttcctttgcttccgcggaaagatttggcgatttgttcatctactaaagttgcatctctcttgtgcgtgtttgccaccgtggtcttgttatcatcgtccaacgttgggtcgtctgatagatatagatctgggccatctggtgatttgcttgttcctcttcagggtgattgtttcgaggagtgtggagtggagccatggggaagaagggcaagtggttcggcgcggtcaagaaagtgttcagccctgaatccaaggagaagaaggaggagaggcagaggaggaaatcagcagctagcaaccctactccacgagatctgaccccgtcgacctccttggaagtcaatgtttcggtgccaccccctccagctcctccggcccttcaccagattgaggaaatcagggcccctgaagctgagcaggagcagagcaagcacgtcaccgtagaggaggctcctgctgcccctgcacaggcgtcggtgctgccacctggtgtgccaagtgaagagcttgctgcaatcaagattcagactgccttccgaggttacctggcaaggagggcactgcgagcgctgcggggccttgttcgattgaaatcattggttgagggtgattcagttaggcgtcaatctgcaagcactcttcgctgtatgcagactctatcgcgggtgcagtcacaaatacgttctaggagagcaaagatgtctgaggagaaccaggcccttcagcgccagctcctactgaagcaggaactggagaatttcaggatgggtgagaactgggatgacagcactcaatccaaagagcaaatcgaggcaagcctaataagcaggcaagaggcagcgattagaagagaaagagcgcttgcatatgcattttcacatcagtggaagagcacttcgagatctgtcaacccaatgtttgtagacccaaacaacttgcagtggggctggagctggttggagcgctggatggctgcaaaaccttgggagggctgcaatggggctgataaggagagcaacattgaccgtggatctgttaagagcatgagcttgaaccttggagagggtgagatcacaaaagctttcaaccgccgggactcaaagccagaaaagccatcaccgccaactccaaaactgacccgtccagcctccaggcaatccccttcgacgccctctgctaaagtagcgccaatacctgctaggagaaaatccgccacgccaaagaatgggctttcacatgtggatgacgatgcgagaagtgtgttcagcgtgcagtctgagcgaccaaggaggcacagtatagccacctcgactgtgcaggacaatgagagtctcgcaagctccccatcactcccaagttacatggttcccacagaatctgcaagggcgaagtctcgtctccagggatcagcattgactaatggtgcagagacaccggagaaaggaagctctgctggaccggtcaagaaaaggttgtcatttcaaggtggaacagcggctgcctcaccaatgcgacggcattctggtcctcccaaggtggacagtgtgatgaaggatattgttgccccaccacagccagaggccttggtgatcaatggtggaagcaagtgactcataccaggaggggaaagcggattatgaatatatattttatcgatgaagaaaggttaacgtgatatcagctcaatgagtgatttgaattgttttcttacgaccacattgtttgctctataagattcgcagtacctgccagttgattccattcgttgtttctgtaaaacaagtatcggttcgtcactagaatcaatgaagtttgtatgtaaacaggtcttctatttatgtgagccatatatttcttcttccg

SEQ ID NO: 411 - protein, 471 aa, Panicum virgatum
MGKKGKWFGAVKKVFSPESKEKKEERQRRKSAASNPTPRDLTPSTSLEVNVSVPPPPAPPALHQIEEIRAPEAEQEQSKHVTVEEAPAAPAQASVLPPGVPSEELAAIKIQTAFRGYLARRALRALRGLVRLKSLVEGDSVRRQSASTLRCMQTLSRVQSQIRSRRAKMSEENQALQRQLLLKQELENFRMGENWDDSTQSKEQIEASLISRQEAAIRRERALAYAFSHQWKSTSRSVNPMFVDPNNLQWGWSWLERWMAAKPWEGCNGADKESNIDRGSVKSMSLNLGEGEITKAFNRRDSKPEKPSPPTPKLTRPASRQSPSTPSAKVAPIPARRKSATPKNGLSHVDDDARSVFSVQSERPRRHSIATSTVQDNESLASSPSLPSYMVPTESARAKSRLQGSALTNGAETPEKGSSAGPVKKRLSFQGGTAAASPMRRHSGPPKVDSVMKDIVAPPQPEALVINGGSK

SEQ ID NO: 412 - DNA, 2024 bp, Panicum virgatum
gttctctctccctcgtcactctcgccactgctcccagctgttgcgacctccgatcatccaaggctcctgcacccctgtcagtcctagctccagccaaaaatcgttggcttccgctgcctgctcctccgccttgcacctcccatgaccttccacgcgacatgattgcattgcaggcccctgcggagctcagtgtcctcccacgccgctgacgccttcttgttgcctccccgctgctgcgcacaaccgaaagggccttcctctcttcctttgcttccgcggaaagatttggcgatttgttcatctactaaagttgcatctctcttggtgattgtttcgaggagtgtggagtggagccatggggaagaagggcaagtggttcggcgcggtcaagaaagtgttcagccctgaatccaaggagaagaaggaggagaggcagaggaggaaatcagcagctagcaaccctactccacgagatctgaccccgtcgacctccttggaagtcaatgtttcggtgccaccccctccagctcctccggcccttcaccagattgaggaaatcagggcccctgaagctgagcaggagcagagcaagcacgtcaccgtagaggaggctcctgctgcccctgcacaggcgtcggtgctgccacctggtgtgccaagtgaagagcttgctgcaatcaagattcagactgccttccgaggttacctggcaaggagggcactgcgagcgctgcggggccttgttcgattgaaatcattggttgagggtgattcagttaggcgtcaatctgcaagcactcttcgctgtatgcagactctatcgcgggtgcagtcacaaatacgttctaggagagcaaagatgtctgaggagaaccaggcccttcagcgccagctcctactgaagcaggaactggagaatttcaggatgggtgagaactgggatgacagcactcaatccaaagagcaaatcgaggcaagcctaataagcaggcaagaggcagcgattagaagagaaagagcgcttgcatatgcattttcacatcagtggaagagcacttcgagatctgtcaacccaatgtttgtagacccaaacaacttgcagtggggctggagctggttggagcgctggatggctgcaaaaccttgggagggctgcaatggggctgataaggagagcaacattgaccgtggatctgttaagagcatgagcttgaaccttggagagggtgagatcacaaaagctttcaaccgccgggactcaaagccagaaaagccatcaccgccaactccaaaactaacccgtccagcctccaggcaatccccttcgacgccctctgctaaagtagcgccaatacctgctaggagaaaatccgccacgccagagaatgggctttcacatgtggatgacgatgcgagaagtgtgttcagcgtgcagtctgagcgaccaaggaggcacagtatagccacctcgactgtgcaggacaatgagagtctcgcaagctccccatcactcccaagttacatggttcccacagaatctgcaagggcgaagtctcgtctccagggatcagcattgactaatggtgcagagacaccagagaaaggaagctctgctggaccggtcaagaaaaggttgtcatttcaaggtggaacagcggctgcctcaccaatgcgacggcattctggtcctcccaaggtggacagtgcggtgaaggatattgttgccccaccacagccagaggccttggtgatcaatggtggaagcaagtgactcataccaggaggggaaagcggattatgaatatatattttatcgatgaagaaaggttaacgtgatatcagctcaatgagtgatttgaattgttttcttacgaccacattgtttgctctataagattcgcagtacctgccagttgattccattcgttgtttctgtaaaacaagtatcggttcgtcactagaatcaatgaagtttgtatgtaaacaggtcttctatttatgtgagccatatatttcttcttctg

SEQ ID NO: 413 - protein, 471 aa, Panicum virgatum
MGKKGKWFGAVKKVFSPESKEKKEERQRRKSAASNPTPRDLTPSTSLEVNVSVPPPPAPPALHQIEEIRAPEAEQEQSKHVTVEEAPAAPAQASVLPPGVPSEELAAIKIQTAFRGYLARRALRALRGLVRLKSLVEGDSVRRQSASTLRCMQTLSRVQSQIRSRRAKMSEENQALQRQLLLKQELENFRMGENWDDSTQSKEQIEASLISRQEAAIRRERALAYAFSHQWKSTSRSVNPMFVDPNNLQWGWSWLERWMAAKPWEGCNGADKESNIDRGSVKSMSLNLGEGEITKAFNRRDSKPEKPSPPTPKLTRPASRQSPSTPSAKVAPIPARRKSATPENGLSHVDDDARSVFSVQSERPRRHSIATSTVQDNESLASSPSLPSYMVPTESARAKSRLQGSALTNGAETPEKGSSAGPVKKRLSFQGGTAAASPMRRHSGPPKVDSAVKDIVAPPQPEALVINGGSK

SEQ ID NO: 414 - protein, 467 aa, Zea mays
MGKKGKWFGAVKKVFSPESKEKKEERLRRKSAASNPTPVDLTPSTSLEVNLSVPPPPAPPPVLHQAEEVGVPEAEQEQSKHVAVEEAPAAAPAQASVLPPAVPTQELAAVKIQTAFRGYLARRALRALRGLVRLKSLVEGNSVKRQSASTLRCMQTLSRVQSQISSRRAKMSEENQALQRQLLLKQELENFRMGENWDDSTQSKEQIEASLISRQEAAIRRERALAYAFSHQWKSTSRSVNPMFVDPNNLQWGWSWLERWMAAKPWEGRNGADKESNIDRGSVKSMSLNLGEGEITKAFNRRDSKLEKPSPPTPRPARPTSRHSPLTPSARVAPIPARRKFVTPKNGLSQVDDDARSVLSVQSERPRRHSIATSTVRDDESLTSSPSLPSYMVPTESARAKSRLQGSATANGAETPEKGGSTGPAKKRLSFQGGTVSASPMRRHSGPPKVEIAPPQPEALVVNGGSK

SEQ ID NO: 415 - protein, 1422 aa, Sorghum bicolor
ATGGGGAAGAAGGGCAAGTGGTTCGGCGCCGTCAAGAAGGTCTTCAGCCCTGAATCCAAGGAGAAGAAAGAGGAGAGACTAAGGAGGAAATCAGCAGCTAGCAACCCAGCACCGCTAGATCTGACCCCATCTACCTCCTTGGAAGTCAATGTTTCGGTGCCACCCCCTCCAGCTCCGGCACCTCCTCCAGTTCTCCACCAGGCCGAGGAGGTCAGGGTCCCTGAACCCGAGCAGGAGCAGAGCAAGCATGTCACCGTGGAGGAGCCCCCTGCTGTTCCAGCACAGCCGTCGGTGCTGCCACCTGGTGTGCCAACCGAAGAGCTTGCTGCGGTCAAGATCCAGACCGCCTTCCGAGGTTACCTGGCAAGGAGGGCACTAAGAGCACTGCGAGGTCTTGTTCGATTGAAGTCATTGGTTGAGGGTAATTCAGTCAAGCGTCAATCTGCAAGCACTCTGCGCTGTATGCAAACTCTATCGCGGGTGCAGTCACAAATACGTTCTAGGAGAGCAAAGATGTCCGAGGAGAACCAGGCCCTCCAACGCCAGCTCCTACTTAAACAGGAATTGGAGAATTTCAGAATGGGTGAGAACTGGGATGACAGCACTCAATCCAAGGAGCAAATCGAGGCAAGCCTGATAAGCAGGCAAGAAGCAGCGATAAGAAGAGAAAGAGCGCTTGCATATGCATTTTCACATCAGTGGAAGAGTACTTCAAGATCTGTCAACCCAATGTTTGTAGACCCAAACAACTTGCAGTGGGGCTGGAGCTGGTTGGAGCGCTGGATGGCAGCAAAACCTTGGGAGGGCCGTAATGGGGCTGACAAGGAGAGCAACTTTGACCGCGGATCAGTTAAGAGTATGAGCTTGAACCTTGGAGAGGGTGAAATCACAAAAGCTTTCAACCGCCGGGACTCAAAGCCAGAAAAGCCATCACCACCAACTCCAAAACCAACCCGTCCAGCCTGGCAATCCCCTTCGACGCCATCTGCTAAAGTGGCACCAATACCTGCCAGGAGGAAATCCGCCACGCCAAAGAATGGGCTTTCACAGGTGGACGATGACGCTAGGAGTGTGCTCAGCGTGCAGTCTGAGCGACCAAGGAGGCACAGTATAGCCACCTCGACTGTGCGGGATGATGAAAGCCTCGCAAGCTCCCCATCACTCCCCAGCTACATGGTTCCCACGGAATCTGCAAGAGCCAAATCTCGTCTCCAGGGCTCATCAATGACCAATGGTGCAGAGACACCAGAGAAAGGAGGCTCTACTGGACCAGTCAAGAAGAGGTTGTCCTTCCAAGGTGGAACTGCAGCTGCCTCACCAATGCGGCGGCATTCTGGTCCTCCCAAGGTGGAGAGTGCAGTGAAGGACATTGTTGCACCACCACAGCCAGAGGCCTTGGTAGTCAATGGTGGAAGCAAGTGA

SEQ ID NO: 416 - protein, 473 aa, Sorghum bicolor
MGKKGKWFGAVKKVFSPESKEKKEERLRRKSAASNPAPLDLTPSTSLEVNVSVPPPPAPAPPPVLHQAEEVRVPEPEQEQSKHVTVEEPPAVPAQPSVLPPGVPTEELAAVKIQTAFRGYLARRALRALRGLVRLKSLVEGNSVKRQSASTLRCMQTLSRVQSQIRSRRAKMSEENQALQRQLLLKQELENFRMGENWDDSTQSKEQIEASLISRQEAAIRRERALAYAFSHQWKSTSRSVNPMFVDPNNLQWGWSWLERWMAAKPWEGRNGADKESNFDRGSVKSMSLNLGEGEITKAFNRRDSKPEKPSPPTPKPTRPAWQSPSTPSAKVAPIPARRKSATPKNGLSQVDDDARSVLSVQSERPRRHSIATSTVRDDESLASSPSLPSYMVPTESARAKSRLQGSSMTNGAETPEKGGSTGPVKKRLSFQGGTAAASPMRRHSGPPKVESAVKDIVAPPQPEALVVNGGSK

SEQ ID NO: 417 - DNA, 1836 bp, Panicum virgatum
atctgctgtctccaagctgtcccaagtcctctttcccctgacccctctaaaatctccccagcgacagcgagagagagagagagaggagggaggacgagcgcattcgcatcgtggcaacaggcaccaagggtgattgtttcgaggagcgtggagcggagccatggggaagaagggcaagtggttcggcgcggtcaagaaagtgttcagccctgaatccaaggagaagaaggaggagaggcagaggaggaaatcagcagctagcaaccctactccactagatctgaccccgtcgacctccttggaagtcaatgtttcggtgccaccccctccagctcctccggctcttcaccagattgaggaggtcaggatccctgaagctgagcaggagcagagcaagcacatcaccgtagaggaggcccctgctgcccctgcacaggcgtcggtgcttccacctggtgtgccaagtgaagagcttgctgcaatcaagatccagactgccttccgaggttacctggcaaggagggcactgcgagcgctgcggggccttgttcgattgaagtcattggttgagggtgattcagttaggcgtcaatctgcaagcactctgcgctgtatgcagactctatcgcgggtgcagtcacaaatacgttctaggagagcaaagatgtctgaggagaaccaggccctccagcgccagctcctactgaagcaggaactggagaatttcaggatgggtgagaactgggatgacagcactcaatccaaagagcaaatcgaggcgagcctaataagcaggcaagaggcagcgattagaagagaaagagcgcttgcatatgcattttcacatcagtggaagagcacgtcgaggtctgtcaacccaatgtttgtagacccaaacaacttgcagtgggactggagctggctggagcgctggatggctgcaaaaccttgggagggccgcaatgggactgataaggagagcaatgttgaccgtggatccgttaagagcatgagcttgaaccttggagagggtgagatcactaaagctttcaaccgccgggactcaaagccagaaaagccatccccgccaactccaaaactgacccgtccagcctccaggcaatccccttcgacgccctccgctaaagtagcgccaatacctgtgaggagaaaatccgtcacgccaaagaatgggctttcacatgtggatgacgatgtgagaagtgtgttcagtgtgcagtctgagcgaccaaggaggcacagtatagccacctcgactgtgcgggacgatgagagtctcgcaagctccccatcactcccaagttatatggttcccacagaatctgcaagggcgaagtctcgtctccagggatcagcattgaataatggtgcagagacaccagagaaaggaagctctgctggaccggtcaagaaaaggttgtcctttcaaggtggaacagcggctgcctcaccaatgcgacggcattctggtcctcccaaggtggggagtgcggtgaaggatattgttgccccaccacagccagaggccttggtgatcaatggtggaagcaagtgactcatgacaagtaccaggagggtaaagcggacaatgaatatatattttatccatgaagaaaggttaacgtgatatcagctctatgagtgatttgaattgttttccagttacgaccacattgtttgctctataagattcacagtacctgccagttgattccattcgttgtttctgtaaaacaagtaccggttcgtcactagaatcagtgatgtttgtatgtaaacaggtcttctatttatgtgagccatatatttcttctc

SEQ ID NO: 418 - protein, 471 aa, Panicum virgatum
MGKKGKWFGAVKKVFSPESKEKKEERQRRKSAASNPTPLDLTPSTSLEVNVSVPPPPAPPALHQIEEVRIPEAEQEQSKHITVEEAPAAPAQASVLPPGVPSEELAAIKIQTAFRGYLARRALRALRGLVRLKSLVEGDSVRRQSASTLRCMQTLSRVQSQIRSRRAKMSEENQALQRQLLLKQELENFRMGENWDDSTQSKEQIEASLISRQEAAIRRERALAYAFSHQWKSTSRSVNPMFVDPNNLQWDWSWLERWMAAKPWEGRNGTDKESNVDRGSVKSMSLNLGEGEITKAFNRRDSKPEKPSPPTPKLTRPASRQSPSTPSAKVAPIPVRRKSVTPKNGLSHVDDDVRSVFSVQSERPRRHSIATSTVRDDESLASSPSLPSYMVPTESARAKSRLQGSALNNGAETPEKGSSAGPVKKRLSFQGGTAAASPMRRHSGPPKVGSAVKDIVAPPQPEALVINGGSK

SEQ ID NO: 419 - DNA, 2015 bp, Panicum virgatum
tcactctcgccactgctcccagctgttgcgacttgcgacctccgatcatccaaggctcctgcacccctgtcagtcctagctccagccaaaaatcgttggcttccgctgcctgctcctccgccttgcacctcccatgaccttccacgcgacatgattgcattgcaggcccctgcggagctcagtgtcctcccacgccgctgacgccttcttgttgcctccccgctgctgcgcacaaccgaaagggccttcctctcttcctttgcttccgcggaaagatttggcgatttgttcatctactaaagttgcatctctcttggtgattgtttcgaggagtgtggagtgaagccatggggaagaagggcaagtggttcggcgcggtcaagaaagtgttcagccctgaatccaaggagaagaaggaggagaggcagaggaggaaatcagcagctagcaaccctactccacgagatctgaccccgtcgacctccttggaagtcaatgtttcggtgccaccccctccagctcctccggcccttcaccagattgaggaaatcagggcccctgaagctgagcaggagcagagcaagcacgtcaccgtagaggaggctcctgctgcccctgcacaggcgtcggtgctgccacctggtgtgccaagtgaagagcttgctgcaatcaagattcagactgccttccgaggttacctggcaaggagggcactgcgagcgctgcggggccttgttcgattgaaatcattggttgagggtgattcagttaggcgtcaatctgcaagcactcttcgctgtatgcagactctatcgcgggtgcagtcacaaatacgttctaggagagcaaagatgtctgaggagaaccaggcccttcagcgccagctcctactgaagcaggaactggagaatttcaggatgggtgagaactgggatgacagcactcaatccaaagagcaaatcgaggcaagcctaataagcaggcaagaggcagcgattagaagagaaagagcgcttgcatatgcattttcacatcagtggaagagcacttcgagatctgtcaacccaatgtttgtagacccaaacaacttgcagtggggctggagctggttgaagcgctggatggctgcaaaaccttgggagggctgcaatggggctgataaggagagcaacattgaccgtggatctgttaagagcatgagcttgaaccttggagagggtgagatcacaaaagctttcaaccgccgggactcaaagccagaaaagccatcaccgccaactccaaaactgacccgtccagcctccaggcaatccccttcgacgccctctgctaaagtagcgccaatacctgctaggagaaaatccgccacgccaaagaatgggctttcacatgtggatgacgatgcgagaagtgtgttcagcgtgcagtctgagcgaccaaggaggcacagtatagccacctcgactgtgcaggacaatgagagtctcgcaagctccccatcactcccaagttacatggttcccacagaatctgcaggggcgaagtctcgtctccagggatcagcattgactaatggtgcagagacaccggagaaaggaagctctgctggaccggtcaagaaaaggttgtcatttcaaggtggaacagcggctgcctcaccaatgcgacggcattctggtcctcccaaggtggacagtgtggtgaaggatattgttgccccaccacagccagaggccttggtgatcaatggtggaagcaagtgactcataccaggaggggaaagcggattatgaatatatattttatcgatgaagaaaggttaacgtgatatcagctcaatgagtgatttgaattgttttcttacgaccacattgtttgctctataagattcgcagtacctgccagttgattccattcgttgtttctgtaaaacaagtatcggttcgtcactagaatcaatgaagtttgtatgtaaacaggtcttctatttatgtgagccatatatttcttcttct

SEQ ID NO: 420 - protein, 471 aa, Panicum virgatum
MGKKGKWFGAVKKVFSPESKEKKEERQRRKSAASNPTPRDLTPSTSLEVNVSVPPPPAPPALHQIEEIRAPEAEQEQSKHVTVEEAPAAPAQASVLPPGVPSEELAAIKIQTAFRGYLARRALRALRGLVRLKSLVEGDSVRRQSASTLRCMQTLSRVQSQIRSRRAKMSEENQALQRQLLLKQELENFRMGENWDDSTQSKEQIEASLISRQEAAIRRERALAYAFSHQWKSTSRSVNPMFVDPNNLQWGWSWLKRWMAAKPWEGCNGADKESNIDRGSVKSMSLNLGEGEITKAFNRRDSKPEKPSPPTPKLTRPASRQSPSTPSAKVAPIPARRKSATPKNGLSHVDDDARSVFSVQSERPRRHSIATSTVQDNESLASSPSLPSYMVPTESAGAKSRLQGSALTNGAETPEKGSSAGPVKKRLSFQGGTAAASPMRRHSGPPKVDSVVKDIVAPPQPEALVINGGSK

SEQ ID NO: 421 - protein, 476 aa, Zea mays
MGKKGKWFGAVKKVFSPESKEKKEERLRRKSAASNPAPVDLTPSTSLEVNVSVPPPPAPPPVPRQTDEVRVPEAEQEQSKHVTLEEAPAAAAAPAQAPVLPPGAPTEELAAIKIQTAFRGYLARRALRALRGLVRLKSLVEGNSVKRQSASTLRCMQTLSRVQSQIRSRRAKMSEENQALQRQLLLKQELENFRMGENWDDSTQSKEQIEASLISRQEAAIRRERALAYAFSHQWKSTSRSANPMFVDPNNLQWGWSWLERWMAAKPWEGRNGTDKESNIDRGSVKNMSLNLGVGEGEITKAFNRRDSKPEKPSPPTPKPARPASRQSPSTPSARVAPIPARRKSSTPKNGLSQVDDDVRSVLSVQSERPRRHSIATTSTMRDDESLASSPSLPSYMVPTESARAKSRTATANGAETPEKGGSAGPVKKRLSFQGGAAAASPMRRHSGPPKVESAVKDIAAPPQPEALVANGGGSK

SEQ ID NO: 422 - DNA, 1455 bp, Zea mays
atggggaggaaaggaaaatggttttctagtgtaaagaaagctcttagccctgatcccaaggagaagacagaccagaaatcaaataaatcaaagaagaaatggtttggaaagcaacaactggattcggattccacttctttagaaaatgtcacaatgctgtctcctcctccccaaccagaagaagtgaaattaattgagacaacagatgaagtgaaccagcatactttccctgttccagttgccactgctgcagtacctgagcctgctccgactactgtccaaaccaatattgaggttgttcaactgaccaaggtaaacaaatatgctggcaaatcaaaggaagaagaggcggcaattaagattcaaacaacattcagaggatacatggccagaagagcattgcgggctctgagagggttggcgaggctcaaatttctgatggaagggcctagaataaaaaggcaagcaacacataccctccgctgcatgcagactctagctcgggtgcagtcacagattcacacaaggaggatcagaatgtcagaagagaaccaggccctacagagacaactcctacagaagcatgccaaagagcttgaaaacttgcggggcatgcaatgttttcatattggagaggaatgggatgacagtctacagtcgaaggaacagattgaagctagcctgctaaacaagtttgaggccgctacgagaagggaaagagcactggcttatgctttctctcatcagcaaactttgaagaattcttcacgatctgcaaaccccatgttcatgaatgggaatccttcctggggttggagctggttggaacgatggatggcagcccatccatgggagagccggagcttgatggagaaagaacacaataacgaccactcatctgtaaagagtgccagccgcagcattactggaggagaaataagcaaatcttatgctcgctaccagctcaattctgataaattaactccaagagaaagtgaaaggccaaccaaaaccacgaacctacagtccccatcaactcctaaaaagccagctgcttctacagttgctagaaaattgaagtcagcaagcccaaggagtaacattgggggcattgaagatgactctagaagcatggtcagtgttcaatcagatcgtagtagaaggcatagcattgctggttcatttgtgcgagatgatgagagcctcggaagctctccagcgcttccaagttacatggtacctacacaatctgcaagagcaaagtccagaatacatagcctattgggagcagaaaaggacgggacaccagaaaaggaaaagggttcctctgggcatacaaagaaacggctttcataccctccatcgccagccaaaggaaggaggtattctggccccccaaagttggaaagcagcttcaatgcaagaaatagcgtggctgctggcgagggaatttaa

SEQ ID NO: 423 - protein, 484 aa, Zea mays
MGRKGKWFSSVKKALSPDPKEKTDQKSNKSKKKWFGKQQLDSDSTSLENVTMLSPPPQPEEVKLIETTDEVNQHTFPVPVATAAVPEPAPTTVQTNIEVVQLTKVNKYAGKSKEEEAAIKIQTTFRGYMARRALRALRGLARLKFLMEGPRIKRQATHTLRCMQTLARVQSQIHTRRIRMSEENQALQRQLLQKHAKELENLRGMQCFHIGEEWDDSLQSKEQIEASLLNKFEAATRRERALAYAFSHQQTLKNSSRSANPMFMNGNPSWGWSWLERWMAAHPWESRSLMEKEHNNDHSSVKSASRSITGGEISKSYARYQLNSDKLTPRESERPTKTTNLQSPSTPKKPAASTVARKLKSASPRSNIGGIEDDSRSMVSVQSDRSRRHSIAGSFVRDDESLGSSPALPSYMVPTQSARAKSRIHSLLGAEKDGTPEKEKGSSGHTKKRLSYPPSPAKGRRYSGPPKLESSFNARNSVAAGEGI

SEQ ID NO: 424 - protein, 484 aa, Hordeum vulgare
MGKKGKWLGAVKKVFSPESKEKKEEKLRKKLAARDPSPPDLTPSTSLEVNVSMPPPPPAVPSPHQTEEVQVRDVELELELELEQEQEQSKHVTVEAAPDAPAQTSAALPPGVSREELAAIKIQTAFRGYLARRALRALRGLVRLKSLVEGNSVKRQAASTLRCMQTLARVQSQIRSRRLKMSEENQALQRQLLLKQELDSLRMGEHWDDTTQSKEKIEASLISRQEAAIRRERALAYAFSHQWKSSSRSSNPMFVDPNNPHWGWSWLERWMAAKPSEAGRTGTGKESNIDQGSVKSMSLNLGEGEITKAFNRRGSKPDKSSPTTPKLTRPASRLSPSTPTAKVTPIVVKKKPATPKNGLSQVDDDARSVLSVQSERPRRHSIATSTVRDDESLASSPSVPSYMAATKSARAKSRLQGSPLIDSAETTPEKGGSVSIGSAKKRLSFPAGGAPPSPMRRHSGPPKVESMVKDIAVTPQPEALAING

SEQ ID NO: 425 - protein, 472 aa, Hordeum vulgare
MGRKGKWFSSVKKALSPDPKEKTDQKKWFGKQQLDSDSTSLENVTMLSPPPQPEEVKLIETTDEVNQHTFPVPVATAAVPEPAPTTVQTNIEVVQLTKVNKYAGKSKEEEAAIKIQTTFRGYMARRALRALRGLARLKFLMEGPRIKRQATHTLRCMQTLARVQSQIHTRRIRMSEENQALQRQLLQKHAKELENLRIGEEWDDSLQSKEQIEASLLNKFEAATRRERALAYAFSHQQTLKNSSRSANPMFMNGNPSWGWSWLERWMAAHPWESRSLMEKEHNNDHSSVKSASRSITGGEISKSYARYQLNSDKLTPRESERPTKTTNLQSPSTPKKPAASTVARKLKSASPRSNIGGIEDDSRSMVSVQSDRSRRHSIAGSFVRDDESLGSSPALPSYMVPTQSARAKSRIHSLLGAEKDGTPEKEKGSSGHTKKRLSYPPSPAKGRRYSGPPKLESSFNARNSVAAGEGI

SEQ ID NO: 426 - protein, 461 aa, Ricinus communis
MGKKGGWFSAFRKALSPKKSKSKKQEKDPDLVVSSYEETALAAPVPPPPPPPPLPPPPRPAEDVKLTEAESEQSKHAYSVALATAVAAEAAVAAAQAAAEVVRLTSTACYCGKSREEVAAIKIQTAFRGYLARRALRALRGLVRLKTLIQGQSVKRQAANTLRAMQTLARVQSQIRARRARMSEENQALQRQLQQKREKELEKLRSAIGEQWDDSAQSKEQQAWKNSSKSANATFMDPNNPHWGWSWLERWMAARPWESRSTVDNNDRASVKSTMSRALSIGEISRAYSRRDLDHDKPSPGAQKSTRLPSRQSPSTPPSKAPSTSSVTGKIKPPSPRGSAWGGDDDSRSLFSVQSERYRRHSIAGSSVRDDESLASSPSVPSYMAPTQSAKAKSRLPSPLGVDKDGTRDKASVASAKKRLSFSGSPAGLRRHSGPPRVNSSIMNNIEMHIEEQVNKGESGR

SEQ ID NO: 427 - DNA, 2163 bp, Gossypium hirsutum
aaacttttattccttccgtaaaggttcttctttgtttaaaactcaatttttattcctaatatctactgttcccccatgattttgcctcttaagatgggaaagaaagggaaatggttgtcctctctaaagaaagccttcttctcagagtccaagggaaagaaaaaccagaaatcaaaagaacaatttttggagaaggtgcatttggatcccactggttctgatgcagccaagttatccccacttcctcagcctgaagaggtgaaattaattgaacctgaagttgagcaaagcaagcagacttaccctgtggcagttgccaattctcctgccgttccagctcaggttgctctacaggccattcgacatcaacttaatacagatgctaggtttgccggaaaatctaaggaggaagtggcggcaatcaaaattcaagcagctttccgagcttaccttgcaaaaagggcattgcgtgctttaagaggactggctaggttgaaatcactgatggaagggcctgccgccagacggcaagcagccggttcccttcggtgcttgcagactctttctcgtatgcagtgtcagattcatgctcggagaaccaggatgatggaagaaaaccaggctcttcagaggcaactcttgcagaaacatgcgaaagagattgtgaacttgcaaatgggtgaagattgggatgacactgtgcggtcaaaggaacaaattgaggcaagcttgttgagcaaacatgaggctgccatgagaagagaaagggccatggcgtactcatttactcatcagcaaacctggaagaatgcttcgagatctatgaatccattgttcatggatccaagcaatccctcatggggatggagctggatggaacggtggatgacagcccggccatgggaggttcgtggtggcatgagagataaagaacatctcgatgaccagtcatccctaaagagtgcacgaagcaacttcggtggagaaatcagcaaagcttatgctcgttatcaactcaatttggataagcaatccacgaaggccaaccaaaagccaagccgaacttcgagcctcctatccccttctactcctaagtcagcatccataccagcccgaaagctgaagtcagcaagcccgaggagtggtgtggctggtttagatgatgaaacaagaagcatagtcagtatgaagtctgacagaaaccggagacacagcatcgcaggctcctcagtgcgtgataatgagagccttgccaactctccatcacttccaagttacatggtaccaactaagtctgcaagagttaagaccagtttgcagagccccttgggaccagaagcaaatggaacacctgagaaggatccaattggatctgctaagaaacggctttcttatccgccttcaccggccaggctaaggcgccactcctgtctgccaaaagtggacggtagcattagcaatacaaaagttgcagtggtgaatggaggggacggttttttcaaataaaaaagagatgaagtcctgatgcacgctaatccagaagaatcggaaaagaagagagaaactttgtatgtttcaaaagttagttaactaacgggattgtcgttgcacccaaaacaccccgttttcattaaagtgttgcatcgttttattaactttgagccctagtattttaaaaaaaatagtagagatctcttcttgctctctctcccttttcttgcggctagggttttgaaacccctcatcgccgttgttgccacggtgccaccacaagcggtggtaagggcggtgcgagctggcctaccctgaggtgtccccgaaggccaagccttcttaacccaaaagttgcgaaagaaaggtcttcccctccttattcggtccgatcccggtgacggaggagagccctccgcgaagaaatcacgagcgattccagtgttgcgcgacgaatggaagaggtggcgtgtggtgcgatgaaacggcgcgcgttggtggccatgctggtggggagcggcggctgaaggcttggtggctagggtttgctgaaaattttgtttgtgttgtgggcttggactattagggtttgtgaattaggtttgggtattgtcttatttgggccattttaatatataaagggactgttaataaacatttggattttcaccc

SEQ ID NO: 428 - protein, 470 aa, Gossypium hirsutum
MGKKGKWLSSLKKAFFSESKGKKNQKSKEQFLEKVHLDPTGSDAAKLSPLPQPEEVKLIEPEVEQSKQTYPVAVANSPAVPAQVALQAIRHQLNTDARFAGKSKEEVAAIKIQAAFRAYLAKRALRALRGLARLKSLMEGPAARRQAAGSLRCLQTLSRMQCQIHARRTRMMEENQALQRQLLQKHAKEIVNLQMGEDWDDTVRSKEQIEASLLSKHEAAMRRERAMAYSFTHQQTWKNASRSMNPLFMDPSNPSWGWSWMERWMTARPWEVRGGMRDKEHLDDQSSLKSARSNFGGEISKAYARYQLNLDKQSTKANQKPSRTSSLLSPSTPKSASIPARKLKSASPRSGVAGLDDETRSIVSMKSDRNRRHSIAGSSVRDNESLANSPSLPSYMVPTKSARVKTSLQSPLGPEANGTPEKDPIGSAKKRLSYPPSPARLRRHSCLPKVDGSISNTKVAVVNGGDGFFK

SEQ ID NO: 429 - protein, 466 aa, Ricinus communis
METLSLNCFQFMKSKKKWFGKQHQLYSDSISIENARDLSPPLPPPQPEEVKTIETTNEQNVHAAYSVPVAAAAAEPVLPPLETTMEVVRVVKVNKFAGKSGEEMAAIKIQTAFKGYLARRALRALRGLGRLKSLMEGPTIKRQATHTLRCMQTLARVQSQIHSRRIRMSEENQALQRQLLQKHAQELEKLRMGEEWDDSLQSKEQIEANLLNKYEAAMRRERALAYSFTHQQTWKNSSRSANPIFMSSSNPTWGWSWLERWMAAHPWEKGGMTEKELSNDHSSVKTASRSMVGGEISKSYARYQLNSDKLSPAESEKVRQAMSPRSPLTPSKPGSSTIARKLKSASPRSSIGGADDDNRSIISMQSDRYRRHSIAGSSVRDDESLGSSSAVPSYMVPTESARAKSRLQSPLGVDKNGTSEKEKGPLGPAKKRLSYPPSPARPRRQLGPRKMESNLNAEIAVTNGQG

SEQ ID NO: 430 - DNA, 1726 bp, Gossypium hirsutum
gtttcttcttcaatttgtctgaaaaacataacctttccttcttctcaagatctgtttttgttctttctctgtaactgtttaccgacacacacacaaaaaaaaagttcgttcttccgaatttcttgagatctgggcattattgtttcaggatcatatcgaggaaagaaaagatggggaagaaagtaaaatggctatcttctttaaagaaagccttcaatccagagtcaaaggaaaagaaaaatcagattttggataagcaagtgcatttgggtcctagtagttctaatgcggctgcacccacattagaaactgttaatttgtcccctccacctcagccggaagatgagaaaataatcaaacccgagacggttgctgaagctaccgatgatgatgttgttgttgctccagctgttccgaccccggctgctgttacggtcgttcaacgccgacttaatatagactctcggtttgctggaaaatctatggaggaagttgcagcgatcaaaattcagacagcttttcgagtttacatggcgaaaagagcattgtgtgctttacgaggacttgtgaggctgaaatcgttaatggaaggacctgcggtgaaacggcaagtgacgagtacccttcgttgtatgcaaacactttctcgtgtgcagtgtcagattcggatgaggagaatccgtatgaccgaagaaaatcaagctcttcagagacaaatcttgcagaaacatgcgaaagagcttgtgaatttgcagatgggggaagattgggacgatagcttgcaatcgaaggaacaaatcgaagcgagcttattgagcaaacacgaggctgcaatgagacgagaaagggcaatggcttattcatttactcatcagcaaacttggaagaacggttcgaaatctatgaatccgttattcatggatatgaacaacctgacgtggggttggagttggttagaacgatggatggcagctcgaccatgggaaggacgtggcgtgacgggaaaggaaccgaacaacgaccagtcatcggtaaagagtgcacatttcgaaggagaaatcagcaaagcttacgctcgttaccaactcaatttggataataaacaatccccgaaatcgagccaaaagcctaaccgaacatcaagtcacctatccccttctccgaaaccaccttccacaccatccccaaagctgaagtccgcaagccctagcggcagtatcattgcccaggacgacgacacaagaagcatagtcagcgcgcaatccgaacggaaccgaagacacagcattgccggctcattggtgcgtgacgacgagagcttagcaagctcgccgtcacttccgagttatatggtaccaactaaatcggcaagagccaaaaccaggttgcaaagtcccttgggactagaagcaaatggtacacccgacaaaggaccgatcatgtcgaccaaaaaacgactcttgtatccaccttcaccggccaaaccgaggcggcactctggtccaccgagagtcgataccagcattattactaatacaaaaattggtgcggtgaatggtggtgtcatttaatttctctatatttttaattcatacaggttttatttgtgagatttgagaacaaactacgcataatttttagttcattgacaatttgttcattataattcttgtgctggtgttgtattgatttgtataataaattatatacattacttgtttatttt

SEQ ID NO: 431 - protein, 466 aa, Gossypium hirsutum
MGKKVKWLSSLKKAFNPESKEKKNQILDKQVHLGPSSSNAAAPTLETVNLSPPPQPEDEKIIKPETVAEATDDDVVVAPAVPTPAAVTVVQRRLNIDSRFAGKSMEEVAAIKIQTAFRVYMAKRALCALRGLVRLKSLMEGPAVKRQVTSTLRCMQTLSRVQCQIRMRRIRMTEENQALQRQILQKHAKELVNLQMGEDWDDSLQSKEQIEASLLSKHEAAMRRERAMAYSFTHQQTWKNGSKSMNPLFMDMNNLTWGWSWLERWMAARPWEGRGVTGKEPNNDQSSVKSAHFEGEISKAYARYQLNLDNKQSPKSSQKPNRTSSHLSPSPKPPSTPSPKLKSASPSGSIIAQDDDTRSIVSAQSERNRRHSIAGSLVRDDESLASSPSLPSYMVPTKSARAKTRLQSPLGLEANGTPDKGPIMSTKKRLLYPPSPAKPRRHSGPPRVDTSIITNTKIGAVNGGVI

SEQ ID NO: 432 - protein, 516 aa, Hordeum vulgare
MGKKPKWLGAVKKAFSPESKDQKLQRRLAAAAGGTSAPYPPDLTPSASYLEARASSAPPPLRYPDDFPEASLPPPPLPLPAPAPAPAPLPVPQTQTQEEHEIQHAAAAPPTDAPLPAAAAPPQAQAAIVQAPSSSPTLSRELAATKIQTAFRGHLARRALRALKGLVRLKSLVQGHSVKRQATSTLRCMQTLSRVQSKIRTRRIKMSEENQALQRQLLLNQELETLRMGDQWNTSLQSREQIEASMVSKQEAAARRERALAYAFSHQWKSTSRSANPMFVDPSNPHWGWSWLERWMASRPFDGRNGASEKEGSSVDRTSVNSTSLSMNLGEGEMITKADNNAYSLNPVDDGKPAASTPKPSVPASRQSPSTPSPVPARKKSTAPKSGDGDGGDDARSVVSTVRSERPRRHSIGASSVRDDASLSGSSPSVPSYMAATKSASARAKSRGQSPTLSEGAAHVETLEKGWSSVGSAKKRLSFPAGTPPPVPAPRRHSGPPKVRQAAVEGGTEERDSALV

SEQ ID NO: 433 - protein, 427 aa, Arabidopsis lyrata
MGKSWFSAVKKALSPEPKQKKDQKPHKAKKWFGKSKKLDVTNSGEADSPRTVKDAKLKEIEEQQSRHAYSVAIATAAAAEAAVAAAQAAAEVVRLSALSRFPGKSKEEIAAIKIQTAFRGYMARRALHALRGLVRLKSLVQGKCVRRQATSTLQSMQTLARVQSQIRERRHRLSEDKQALTRQLQQKHNKDFDKTGENWNDSTLSREKVEANMLNKQVATMRRERALAYAFTHQNTWKNSSKMGSQTFMDPNNPHWGWSWLERWMAARPNENQSVILTPDNADKESSSRAMSEMVPRGKNLSARGKTPNSRRGSSPRVRQVPSEDSNSMLSIQSEQPCNRRHSTCGSIPSTRDDESFTSSFSQSVPGYMAPTQAAKARARFSNLSPLSSEKTAKKRLCFSGSPKTVRRFSGPPKLESNLTKKDTNLA

SEQ ID NO: 434 - protein, 463 aa, Arabidopsis lyrata
MGKKAKWFSSVKKAFSPDSKKSKQKLAEGQNGVISNPPVVDNVRQSSSSSPPPALPPREVRVAEVIDERNRDLSPPSTADAVNVRATDIPVVPSSSAPGVVRRATPARFAGKSNEEAAAILIQTIFRGYLARRALRAMRGLVRLKLLMEGSVVKRQAANTLKCMQTLSRVQSQIRARRIRMSEENQARQKQLLQKHAKELAGLKNGDNWNDSIQSKEKVEANLLSKYEATMRRERALAYAYSHQQNWKSNSKSGNPMFMDPSNPTWGWSWLERWMAGRPLESSEKEQNSNSNNDNAASVKGSINRNEAAKSITRNGSTQPNTPSSARGTPRNKNSFFSPPTPSRLIQSSRKSNDDDAKSTISVLSERNRRHSIAGSSVRDDESLAGSPALPSYMVPTKSARARLKPQSPLGGTTQENEGFTDKASAKKRLSYPTSPALPKPRRFSAPPKVESGGVAVTNEAGS

SEQ ID NO: 435 - protein, 499 aa, Arabidopsis lyrata
MGKKKWFSAVKKAFGSPSKNEKEKTDTSSVKESEKLDNNNRKQIQDENQHQKKWNGATDDNSVLQTEDEQSKHAMAVAVATAAAAEAAVAAAQAAAAVVRLTGGRPSVHGGKPKEEWAAVKIQTAFRGYLARRALRALRGLVRLQALVRGHAVRRQATMTLRCMQALVRVQARVRARRVRMAEESQTLKNQVWQKRLEEQEALPDVETSVEVWDHSVKTAEEIQAKMQSKQEAAMKRERALAYAFSHQLWRSEPKDASAMYLDGDPEKSHWGWSWLERWMTARPWEGRAMEKDAPDGFSLKSTEDVVTKILEVDSGRFSSSGRRKQENELNSPSLTNKSNGNHTPSARGMLHSASPRSTRLVDDRTPRSTINNSLSAIAVKHPNNSSISSSVRDDESLASYPSVPSYMAPTESTRARSRSSSTPKQRPATPDKDAAKKRLSYPLADGVVPNSGPLRSSRNSGITQKSPGLKGKPGTGMSLQDSIGSDAPLLGEHTKRFR

SEQ ID NO: 436 - protein, 498 aa, Arabidopsis lyrata
MGKKKWFSAVKKAFGSPSKNEKEKTDTSSVKESEKLDNNNRKQIQDENQNQKKWNGATDDNSVLQTEDEQSKHAMAVAVATAAAAEAAVAAAQAAAAVVRLTGGRPSVHGGKPKEEWAAVKIQTAFRGYLARRALRALRGLVRLQALVRGHAVRRQATMTLRCMQALVRVQARVRARRVRMAEESQTLKNQVWQKRLEEQEALPDVEASVEVWDHSVKTAEEIQAKMQSKQEAAMKRERALAYAFSHQLWRSEPKDASAMYLDGDPEKSHWGWSWLERWMTARPWEGRAMEKDAPDGFSLKSNEDVVTKILEVDSGRFSSSGRRKQENELNSPSLTNKSNGNHTPSARGMLHSASPRSTRLVDDRTPRSTINNSLPAIAVKHPNNSSISSSVRDDESLASYPSVPSYMAPTESTRARSRSSSTPKQRPATPDKDAAKKRLSYPLADGVVPNSGPLRSTRNSGITQKSPGLKGKPTGMSLQDSIGSDAPLLGEDTKRFR

SEQ ID NO: 437 - protein, 510 aa, Hordeum vulgare
MGKKVRWFDAVQRILSTSGPDREDKEEKQPAERLTTRSSFKKLWHFGKSSTSTSTTPETAHQQPGQQEAVEVAGDKSVGTTSEQNDGGFHVAPVAQQPAEATAIVMPRAPARSKEELAAVRIQTACRGYLVRRGYQTRAQARLMSLLEGVAVKRQTEEALYSMQAMTRVQTQIYARRVKKEKDLKSQVQPKQGPDKTKIGEGWDPTHQSKEQIEATLATKQEAASRRQRALSYAFSHQWRNRSPSSSSSGRGRVTPTQSHPPTFMDPGCPNWGWSWAERWTAAARPWESQTATQDKDRPAPAKGAKPRVSISVHIPTTPTGRSPRPPGRQSPSTPTRPLSPSVMGKTVASPRRAPSPRGSPFNRSGSVLSERPRTSQEHPGASSGGGGDEKEASLRRTTSLWSGELPRSLSLGVRDVDADETGGAPVTPSYMQATKSVKAKARCASPAAADRAELPERAPLVSSPSMKKRPSLELAEKQGVSSPRTPRTPGTPGKAKAEIRAKRPPSPRF

SEQ ID NO: 438 - protein, 499 aa, Picea sitchensis
MDKKGSCFSVLKWAFCAKQKSHATKQGKKKGGCCFGSFRHHEPAAPKEDTRVKKTLGEGQEIRNEHEKPLVEVKEEQNSHASAVAVATAAAAEAAAAAAHAVAKVVRLTESYYSTNSPEECAAIKIQTAFRGYLVRRNFHTLRGLMRLQALVQGQSVRRQATNTMRCMQALVRVHSQICSRRIRMFEENQALQHHLQQKYEKELENRTSNSEADHQQDWESSLLTKEEIEARLQSKIEAAIKRERALAYAFSHHLWKNPPKSVQTMLMEIDPDKPHWGWSWLERWMATRPWDNHRMTMKENSTRKLQTIGEIGQKTSHIGLKQHNAEVTNIGTIKSDPFTPLSKPSIPNKMPLTGTDIKSDVNVLRSERPRYSSRYGVAGTSSLRDDESLMSSPRIPNYMASTESAKAKVRSQSTPKQRPGTPDTEPTSYRRKRLSFPLSEASSGPYRSTKGSMFPHTSPSLKGISGTSKSKKSVSSLRDLSIESDNSSLNWGHRKPFR

SEQ ID NO: 439 - protein, 321 aa, Zea mays
MQTLSRVQSQIRSRRAKMSEENQALQRQLLLKQELENFRMGENWDDSTQSKEQIEASLISRQEAAIRRERALAYAFSHQWKSTSRSANPMFVDPNNLQWGWSWLERWMAAKPWEGRNGTDKESNIDRGSVKNMSLNLGVGEGEITKAFNRRDSKPEKPSPPTPKPARPASRQSPSTPSARVAPIPARRKSSTPKNGLSQVDDDVRSVLSVQSERPRRHSIATTSTMRDDESLASSPSLPSYMVPTESARAKSRTATANGAETPEKGGSAGPVKKRLSFQGGAAAASPMRRHSGPPKVESAVKDIAAPPQPEALVANGGGSK

SEQ ID NO: 440 - protein, 449 aa, Zea mays
MVKKAKWLKNVKKAFSPDLKKLKHQSVECQNSVISYPVLVATSRSSPPQFEVRVDEVNNEEKKKNLCPPPSDSVIATEEDVFVDSPPSSPEFVRPATPDRFAGKSKEEASAILIQSTFRGYLARRESREMRGLARLKLLMDGSVVQRQAANTLKCMQTLTRVQSQIRSRRVRMSEENQARHKQLLQKHAKELGGLKNGGNWNDSNQSKEQIEAGLLNKYEATMRRERALAYAFTHQQNLKSNSRSANPMFMDPSNPTWGWSWLERWMADRPWESSEKEQNNNSENSSVKTSSNRNSHRGETAKSSNRKNLNSSAQLNTPSSSSLSTTRIPRKNRPTPPSIKSKTTDENAKSSEKNRRHSIARSSVSDDENSTARRRNMVPTKSTRGKLKAQSSSSVSVITTTMEENGVLPQKAAAKKRISYSASPAPKPRRSSAPPKVENGLLKAVRTP

SEQ ID NO: 441 - protein, 454 aa, Arabidopsis thaliana
MVKKAKWLKNVKKAFSPDSKKLKHESVECQDSVISYPVLIATSRSSSPQFEVRVDEVNYEQKKNLYPPSSDSVTATVAHVLVDSPPSSPESVHQAIVVNRFAGKSKEEAAAILIQSTFRGHLARRESQVMRGQERLKLLMEGSVVQRQAAITLKCMQTLSRVQSQIRSRRIRMSEENQARHKQLLQKHAKELGGLKNGGNWNYSNQSKEQVEAGMLHKYEATMRRERALAYAFTHQQNLKSFSKTANPMFMDPSNPTWGWSWLERWMAGRPWESSEKEQNTTNNDNSSVKNSTNRNSQGGETAKSSNRNKLNSSTKPNTPSASSTATRNPRKKRPIPSSIKSKSSDDEAKSSERNRRPSIARPSVSDDETLSSSTARRSSNLIPTTKSARGKPKSQTSSRVAVTTSTTEESSILPEKAPAKKRLSTSASPAPKPRRSSAPPKVEKGVLKAERTP

SEQ ID NO: 442 - protein, 602 aa, Arabidopsis thaliana
MGKSTRWLLALIGLKKSSKKSSVEEQDVRKSSKDKRRWSFGKSAAAPADFAKPSSSSAREMDHSQNEQAKHAIAIAAASAAAAEAAVAAAHAAAAVVRLTGAANYASPVFELISREEWAAIKIQTAFRGYLARRALRALKAVVRIQALFRGHRVRKQAAITLRCMQALVRVQARVRARRVRMSKEGQAVQQQLLERRGRYRKSMDGWIASTGTVEDFHAKNERKHLGAMKRERALAYAFSQSNQLTKFLAELQSRTASPMVIDCEPDTPHWGWSWLERWMAARPWENPFEATSPVDSGCTKIVEVDYNNQSTNKLNPAKAPPPPPLSSTPPSSNTAIAKPAKKRSGSASESIPDAHKIVIPSPTNPAPPISTDRHGLSPNAQNLLSHPSPVIDHHHHADQSSSAAAIAASPKDLLALDDCFAKNTLKPLKNAAAAGAGTSAENQSFVQDFQQGIIRDMDLTLAGSSSELPAAAVPSYMATTQSSKAKVRSHSTPKQRPEQLLGLTMPDTPRKSMRNSMNGGHLLLAATTASGSFSSATAAANNAGSIAGALLRRGGSASSSQHGNGRGFSTGSMALDRSLISFKDGHASLSINGDMRKPFRF

SEQ ID NO: 443 - protein, 603 aa, Arabidopsis thaliana
MGKSTRWLLALIGLKKSSKKTSVEEQDVRKSSKDKRRWSFGKSAAAPADFVKSSSSSAREMDHSQNEQAKHAIAIAAASAAAAEAAVAAAHAAAAVVRLTGAANYASPVFELISREEWAAIKIQTAFRGYLARRALRALKAVVRIQALFRGHRVRKQAAITLRCMQALVRVQARVRARRVRMSKEGQAVQQQLLERRGRYRKSMDGWIASTGTVEDFHAKNERKHLGAMKRERALAYAFSQSNQLTKLLAELQSRTASPMVIDCEPDTPHWGWSWLERWMAARPWENPFEATSPVDSGCTKIVEVDYNNQSANKLNPAKAPPPPPLSSTPPSSNTAIAKPAKKRSGSASESIPDAHKIVIPSPTNPAPPIATDRHGLSPNAQNLLSHPSPVIDHHHHADQSSSAAAIAASPKDLLALDDCFAKNTLKPLKNAAAAGVGTSAENQSFVQDFQQGIIRDMDLTLAGSSSELPAAAVPSYMATTQSSKAKVRSHSTPKQRPEQLLGLTMPDTPRKSMRNSMNGGHALLLAATTASGSFSSATAAANNAGSIAGALLRRGGSASSSQHGNGRGFSTGSMALDRSLISLKDGHASLSINGDMRKPFRF

SEQ ID NO: 444 - protein, 527 aa, Arabidopsis thaliana
MGKNWLTCVSVACLSPGKDKKNQKPEKPKRKWSFGKQKSRESFDFPLEETPPVDPSPSSVHRPYPPPPPLPDFAPQPLLPPPSPPPPPPAYTINTRIYGESKESKNRQALALASAVAAEAAVVAAHAAAEVIRLTTPSTPQIEESKEETAAIKIQNAYRCYTARRTLRALRGMARLKSLLQGKYVKRQMNAMLSSMQTLTRLQTQIQERRNRLSAENKTRHRLIQQKGHQKENHQNLVTAGNFDSSNKSKEQIVARSVNRKEASVRRERALAYAYSHQQTWRNSSKLPHQTLMDTNTTDWGWSWLERWMASRPWDAESIDDQVSVKSSLKRENSIKSSPARSKTQKSASQSSIQWPVNNDTKSRKIEVTNRRHSIGGGSSENAKDDESVGSSSSRRNSLDNTQTVKSKVSVETTSNVSNAQTVKPKANVGAKRNLDNTKTLKSKSSVGTTGNLANTEAVKSKVNVGTTSMPKKEVVADKKKPPQMVLPKKRLSSSTSLGKTKKLSDSDKATTGVANGEKKRRNGGSS

SEQ ID NO: 445 - protein, 457 aa, Arabidopsis lyrata
MVKKAKWLKNVKKAFSPDSKKLKHESVECQDSVISYPVLIATSRSSPPQFEVRVDEVNYEQKKNLCPPSSVSVTPTVAHVLVDSPPSSPESVHQAIVDDRFAGKSKEDAAAILIQSTFRGNLSLSLSCVMRGQARLKLLMEGSVVQRQAAITLKCMQTLSRVQSQIRSRRIRMSEENQARHKQLLQKHAKELGGLKNGGNWNDSNQSKEQVEAGMLHKYEATMRRERALAYAFTHQQNLKSNSKTANPMFMDPSNPTWGWSWLERWMAGRPWESSEKEQNTTNNNNNENSSVKNSTNRNSHGGETAKSLNRNKLNISTQSNTPSSSSTATRNPRKKRPIPSPIKSKTSDDEAKSSEKNRRHSTARSSVSDDETLTSSTAKRSNHLIPTTKPVRGKPKPQSSSRAAVTTTTTEENSVLPEKAPAKKRLSTSASPAPKPRRSSAPPKVEKGALKAERTP

SEQ ID NO: 446 - protein, 516 aa, Arabidopsis thaliana
MKDLSENFRRKWKPEKPKRKWSFGKQKSRESFDFPLEETPPVDPSPSSVHRPYPPPPPLPDFAPQPLLPPPSPPPPPPAYTINTRIYGESKESKNRQALALASAVAAEAAVVAAHAAAEVIRLTTPSTPQIEESKEETAAIKIQNAYRCYTARRTLRALRGMARLKSLLQGKYVKRQMNAMLSSMQTLTRLQTQIQERRNRLSAENKTRHRLIQQKGHQKENHQNLVTAGNFDSSNKSKEQIVARSVNRKEASVRRERALAYAYSHQQTWRNSSKLPHQTLMDTNTTDWGWSWLERWMASRPWDAESIDDQVSVKSSLKRENSIKSSPARSKTQKSASQSSIQWPVNNDTKSRKIEVTNRRHSIGGGSSENAKDDESVGSSSSRRNSLDNTQTVKSKVSVETTSNVSNAQTVKPKANVGAKRNLDNTKTLKSKSSVGTTGNLANTEAVKSKVNVGTTSMPKKEVVADKKKPPQMVLPKKRLSSSTSLGKTKKLSDSDKATTGVANGEKKRRNGGSS

SEQ ID NO: 447 - protein, 516 aa, Arabidopsis lyrata
MKDLSENFRRRWKPEKPKRKWSFGKQKSRDSFDFPVEETPTVDPSSSSVHRPSPPPPPLPDFAPQPLLPPPSPPPPPPAYTSNTRLYVDSKEAKNRQALALASAVAAEAAVVAAHAAAEVVRLTTPSTHQTEESKEETAAIKIQNAYRCYKARRTLRALRGMARLKSLLQGKYVKRQMNAMLSSMQTLTRLQTQIQERRNRLSAENKTRHRLIQQKGHQKENNQNLVTAGNFDSSNKSKEQIVARSVNRKEASVRRERALAYAYSHQQTWRNSSKLPHQTLMDTNTTDWGWSWLERWMASRPWDAESIDDQISLKNSLKRENSIKTSPARSKTLKSASQSSIQWPVNNDTKSKKIEVANRRHSIGGGSSANAKDDESVGSSSSRRNSLDNTQTVKAKVSVETTSNVTNAQPVKPKASVGTKRNLDNTKALKSKSSVGTTENLANTQAVKSKVNVGTTGLPKKEVVSDKKKPPQMVLPKKRLSSSTSLGKTKKLSDSDKATTGAANGEKKRRNGGSS

SEQ ID NO: 448 - DNA, 1543 bp, Zea mays
cttggaagtcaatctttcggtgccaccgcctccagctcctcccccagttcttcaccaggccgaggaggttggggtccctgaagccgagcaggagcagagcaagcatgtcgccgtggaggaggcccctgctgccgccccagcgcaggcgtcggtgctgccacctgctgtgccaacccaagagctcgccgcagtcaagatccagaccgccttccgaggttacctggcaaggagggcactacgagcactgcgaggccttgttcgattgaagtcattggttgagggtaattcagtaaagcgtcaatctgcaagcactctgcgctgcatgcaaactctatcacgggtgcagtcacagatatcttccaggagagcaaagatgtccgaggagaaccaggctctccaacgccagctcctacttaaacaggaactggagaatttcagaatgggtgagaactgggatgacagcacccaatccaaggagcaaatcgaggcaagcctgataagcaggcaagaggcggcgataagaagagaaagagcgcttgcatatgcattttcacaccagtggaagagtacatcgagatctgtcaacccaatgtttgtagacccaaacaacctgcagtggggctggagctggctggagcgctggatggcagcaaaaccatgggaaggccgcaatggggctgacaaggagagcaacattgaccggggatccgttaagagcatgagcttgaaccttggagagggtgagatcacaaaagctttcaaccgccgggactcaaagctagaaaagccatcgccgccaactccaagaccggcccgtccaacttccaggcattcccctttgacgccctctgctagagtggcaccgatacctgcgaggagaaaatctgtcacgcccaagaacgggctttcacaggtggacgatgacgcgaggagcgtgctcagtgtgcagtctgagcggccaaggaggcacagtatagccacctcgactgtgcgggacgacgagagcctcacgagctccccgtcgctcccaagctacatggttcccacagaatctgcaagggccaaatctcgcctccagggttcagcaatggccaatggcgcagagacacctgagaaaggaggctcaactggaccagccaagaagaggttatccttccagggtggaactgcggctgcctcgccaatgcgacgacattctggtcctcccaaggtggagatcgcgccaccacaaccagaggccttggtagtcaatggtggaagcaagtgacacatatgtgatgagtaccaggatgagaaacggattatgaagatattagtttcattttcatccatgaatagaagttaaaagtggtatcatatctatgaatggtttcaattgtttttctgttacaaccacattatttgctatatacgattcacagtacctgccagttgattccattggttgtttctgtaaaacaaatatcaatttgtcactagaatctgtgatgtttgtatgtaaacagatcctctatttatgtgagacatatatttcttttctttc

SEQ ID NO: 449 - protein, 314 aa, Zea mays
MQTLSRVQSQISSRRAKMSEENQALQRQLLLKQELENFRMGENWDDSTQSKEQIEASLISRQEAAIRRERALAYAFSHQWKSTSRSVNPMFVDPNNLQWGWSWLERWMAAKPWEGRNGADKESNIDRGSVKSMSLNLGEGEITKAFNRRDSKLEKPSPPTPRPARPTSRHSPLTPSARVAPIPARRKSVTPKNGLSQVDDDARSVLSVQSERPRRHSIATSTVRDDESLTSSPSLPSYMVPTESARAKSRLQGSAMANGAETPEKGGSTGPAKKRLSFQGGTAAASPMRRHSGPPKVEIAPPQPEALVVNGGSK

SEQ ID NO: 450 - DNA, 973 bp, Arabidopsis thaliana
aacacatctctctctctctctctctctttctctctttttatatttttgtgtcccaatctcttcttcatttctgtttggttgccgagaaaacgcaggaaacttttctgcaaaaaaactcggtgaccatatttaaaactttcccacgttaattctctcttctttgttttgtttcagattcattacttttctccaaaaaactttcttcaagatctgctcttttaaataattatggcggaagaacatcgatgcgagacgcctgaaggtcaccgtctctgcgttaacaactgcggtttcttcggaagctcagcgacaatgaatctatgttcaaactgttacggcgatctctgtctcaaacaacaacaacaagcttccatgaaatcaaccgtcgaatcatctctctctccggtgatcgcacctgttctcgaaaactacgcggcggagttagagatcccgacgacgaagaagacagaggagaaaaaaccgattcaaattccgacggagcaaccgtctccgccgcaacggccgaatcgatgcaccgtatgtaggaaacgggtcgggttaaccgggtttatgtgtcggtgcgggacgactttttgtgggagtcataggtatccggaggttcatggttgtacgtttgatttcaaatcggcgggacgtgaagagatcgcgaaagctaatccgttggttattgcggcgaagcttcagaaaatatgaatcggagccgttgaccgatttctatctttaccctgagaaaatttcgattgtctcggtggatctcagccgttcattatgttattgtattacggacacgtgtcgcaagattaaggttgagatggtttcgtaactttttaattattttctttgtttatttccgaagaaattaaagtttttatgattgtgtggcttttgcttgtaaaaaaaaaaagggtttctctttgggaaaaagaaaagaaaatatatgaaattgtgtccc

SEQ ID NO: 451 - protein, 161 aa, Arabidopsis thaliana
MAEEHRCETPEGHRLCVNNCGFFGSSATMNLCSNCYGDLCLKQQQQASMKSTVESSLSPVIAPVLENYAAELEIPTTKKTEEKKPIQIPTEQPSPPQRPNRCTVCRKRVGLTGFMCRCGTTFCGSHRYPEVHGCTFDFKSAGREEIAKANPLVIAAKLQKI

SEQ ID NO: 452 - DNA, 709 bp, Gossypium hirsutum
ttctttcaccttttcctttcaagatcgagagaaaaaaagaatggcagaggagcatagatgccaagcgccagaaggccatcgtctttgcgtcaataactgcggctttttcggaaattcggcgacgatgaacctttgctccaaatgttacagagatctctgtctcaaggaacaggaagcttcttcgatcaaatccgctctttcctcttccccttcgtcttcgtcaacggttgtcgaatctatttctcaggttcctcttttggctctccctgaagtcaacagagaatcggcggtcccggagattgcaccggcggccgaacagctatcgcagcaacaaccgaatcggtgcatggtttgcaggaagcgggtcgggttgaccggattcagatgcaagtgcggtgttacgttttgcgggtcccacaggtaccctgagaatcacgggtgtacgttcgatttcaagaaggtcggcagagaggagatcgcacgcgctaatcccctcgtcaaagcagggaagctcgagaagatttgagtagaagatgatgatgatgggaagccaagccattgggaaattttcaaatttcatcaaactttgataagatcgagacacgtgcttcggttgtgggccgcaccacgaagagtaaaccaattgggctggataaatatattttcttcttaaaatataaatattttataataatattttaaattatgt

SEQ ID NO: 453 - protein, 161 aa, Gossypium hirsutum
MAEEHRCQAPEGHRLCVNNCGFFGNSATMNLCSKCYRDLCLKEQEASSIKSALSSSPSSSSTVVESISQVPLLALPEVNRESAVPEIAPAAEQLSQQQPNRCMVCRKRVGLTGFRCKCGVTFCGSHRYPENHGCTFDFKKVGREEIARANPLVKAGKLEKI

SEQ ID NO: 454 - protein, 161 aa, Vitis vinifera
MAEEHRCEAPEGHRLCANNCGFFGSPATLNLCSKCYRDLRLKEEQASSAKSAVEKSLSAASSSTAPLSPPALTLPEAANEITVPAAVTAAVPSPSATQPNRCSTCRKRVGLTGFRCRCGITFCGVHRYPEQHGCTFDFKTLGKEAISKANPVVKAEKLHKI

SEQ ID NO: 455 - DNA, 1190 bp, Glycine max
tataaatcaggtactaactctttctccttctcccctcatcccaatacccctttatttttttcgttttttttttatggaaaaaaatattgtagcaatttcgtcgtagaaacaaaattcccctattttcggcacgccgttgttgaatttccaatctgtgattttttttcttcttctatttatacgtgataattccaaaaagcctaacgcgagagattcatcagcttttcaattattcctcgaattattttgaaggaatcatccaaactgcttgaaatattcatcatcaacaacctcacgctgttatagatattctctctctctctctccctctctctctctctcacacacacacacacacagatccagacatggccgaagaacaccgatgccaagctcccgaaggtcacagactctgctccaacaactgcggtttctttggtagccccgccaccatgaatctctgttccaaatgctacagagacatccgtttgaaggaagaagaacaagccaaaaccaaatccacaatcgaaaccgctctttcaggatcttcctccgccaccgtcaccgcaaccgccgtcgttgcctcctccgtggaatccccttcggcgccggttgaatccctccctcaaccaccggtgctgatttcgccggatatagccgcaccggttcaggcgaaccggtgcggcgcgtgtaggaagcgcgtggggttgacagggttcaagtgcaggtgcggaacaacgttttgtgggagccacaggtaccccgagaaacacgcgtgtggcttcgatttcaaggcggtggggagagaggagatagcacgggcgaatcccgtgatcaaaggcgagaagctacggaggatttaatctgcgccgttggatgatcgaagcgattagggtgagttgatcaggaccgttcgtcgtggaccgttgatacgaaccgatttcgagcgtgtaaataaaaaaatctattattatgacgacattgggaagggttgaataagtcatattttggtggctttggtttgtgtttgtgcattaaaagtggaaaaatgttaggtccacccacgttcggaaattgaggggtttagaattgaaatgaaatgtaaaaaagtttagtttgattatttttctacggcatttctatttttctagtgggtggcgcgtttgccagaaagggaaattatcgtcggc

SEQ ID NO: 456 - protein, 164 aa, Glycine max
MAEEHRCQAPEGHRLCSNNCGFFGSPATMNLCSKCYRDIRLKEEEQAKTKSTIETALSGSSSATVTATAVVASSVESPSAPVESLPQPPVLISPDIAAPVQANRCGACRKRVGLTGFKCRCGTTFCGSHRYPEKHACGFDFKAVGREEIARANPVIKGEKLRRI

SEQ ID NO: 457 - protein, 166 aa, Ricinus communis
MAEEHRCEAPEGHRPCVNNCGFFGSAATMNLCSKCYRDYCLKEQHQHQQEASIKASLSVPSPSSAAAIVDNSQPAPSPDDVLRSPEAVEEEVKVVVTAIEQKQPNRCFVCRKRVGLTGFRCRCESMFCGAHRYPEKHNCTFDFKKIGREEIARANPLVVAQKLHKI

SEQ ID NO: 458 - protein, 165 aa, Lotus japonicus
MAEEHRCEAPEGHRLCVNNCGFSGSPATMDLCSKCYRDIRLKEQQEASTKSTIETALSSSSSVAKPPSSTSSPSPAVDLAPPAKAETASISLTAGPILQAAQPNRCATCRKRVGLTGFKCRCEVTFCGAHRYPEKHACSFDFKTVGREAIARENPVVRAEKLRRI

SEQ ID NO: 459 - protein, 156 aa, Solanum pennellii
MAEEHGFEAPEGHILCANNCGFFGSPTTQNFCSKCYNEVYIKGGLQKPIDSLFPPQLPIPSTSSILVLQESAAAEEEPEVVTAAVAVAVQPIPAQPNRCSACRKKVGLTGFKCRCGTTFCGTHRYPEIHGCSFDFKSIGREAIAKANPVVKAKKLG

SEQ ID NO: 460 - protein, 159 aa, Lotus japonicus
MAEEQHRCQEPRLCVNNCGFFGSPATQNLCSKCYGDLRQSQPLNQLLAPSSSASVSSFSSPTVDVIKNQIAPVLVVEGDEKGEFKAEPTVVVPQQKPNRCLTCRRRVGLTGFNCRCGMVFCGTHRYPEQHDCEFDFKSLGKEQIAKANPVVKGEKLQRI

SEQ ID NO: 461 - protein, 162 aa, Malus x domestica
MAEEHRCQPPQLCVNNCGFFGSPTTQNLCSKCYRDLQIKEQQVLALNQTLISSSSSPSSSCPLSSLPVSVSPAHEAQVERVIEAKEEEKEAAPSSAGAHANKCMTCRRRVGLTGFQCRCGMTFCGTHRYPEQHACGFDFRGMGKEQIAKANPVVKADKLQKI

SEQ ID NO: 462 - protein, 149 aa, Lotus japonicus
MAEEHGFEAPEGHILCANNCGFFGSPTTQNFCSKCYNEVYIKGGQQKPIDSLFPPSQLPIPSTSSILVLQESTAAEEEPEVVTAAVTVAVQPISAQPNRCSACRKKVGLTGFKCRCGTTFCGTHRYPEIHGCSFDFKSIGREAIAKANP

SEQ ID NO: 463 - protein, 181 aa, Picea sitchensis
MDQENWNIGADGTGCQAPEGHTLCANNCGFFGSSATRNLCSKCYRDLIMKEAQATSAMAAVEKSFAAGSPMDEVPLSSPDAIVQQNRVQISAAVAGVSSVQLADSGSSSSSPQPPAETPNRCFSCRKRVGLTGFKCRCENTFCGLHRYAEKHSCSFDFKAAGREAIAKANPVVKAAKIDKL

SEQ ID NO: 464 - DNA, 775 bp, Musa acuminata
atagccaggctgctgcctcctccctctcccggacccttttaatcctccgcgaaatactattcttctcctcccctcctccctttggaatcggccacgcggttcaaggcaccgatttggtgttcgccttgttctcacataacaagattgaccggccgagcgattgatctgaaaagaaaggggagggaggagaatggcggaagagcagcgatgccaggagggccaccgcctctgcgcgaacaactgtggcttcttcgggagccccgcgacgctcaacctctgctctaaatgctaccgcgatcaccgcctcaaggaggagcaggagcgacagcagcagccggcctcttctgccgccgcctctgcgatgctcaccgtcgcgaaatccttccctgcctcttcccctgccgtcgtcgtggttgacgaggaggtgagcggcgcctccgtcccgagccggtgcgcgaggtgccgcaagagggtggggctgacggggttccagtgccggtgcggggccacctactgcggcgtccaccggtacgccgagcaacacgactgcacgttcgacttcaaggcggccggccgcgcgaccatcgcccgcgccaaccccgtcgtgaaggccgacaagctccacaagatctgaagaatctccaccctccgtctcccccttcccccggctcgatggacggccccgatctcgtcccggaagagaccccactcccttgtgatatgatgatgattgacggctttctggtggattgctttctccatttctttttttctt

SEQ ID NO: 465 - protein, 147 aa, Musa acuminata
MAEEQRCQEGHRLCANNCGFFGSPATLNLCSKCYRDHRLKEEQERQQQPASSAAASAMLTVAKSFPASSPAVVVVDEEVSGASVPSRCARCRKRVGLTGFQCRCGATYCGVHRYAEQHDCTFDFKAAGRATIARANPVVKADKLHKI

SEQ ID NO: 466 - DNA, 979 bp, Panicum virgatum
atcgccagcgcgcgcgccggccgatctgggggcgggctccgctccacccgaggctcgccgttgacggggtccgcgtccatcggtagcaatggcacaagagagctggaaacaagagtccgaggagactagagtccacgcgcctgaggcccctattctctgcataaacaactgtggtttctttggcagcagcatgacgaacaatatgtgctcgaagtgctatagggacttcatcaagttgatggaagctcctgtggtggaaaagaaggtgaccacatcagcatcttcttccacagcaccactggagacaaagcgagatgatgcgcctgccgctgctgccactgaagctgtggctgagaagcaagcagagcaagagcccccaaagccacccagcaaccggtgtctgacttgccgcaagaaggtcgggctgaccggcttcctctgccgttgcggggacaccttctgctccacgcaccgctacaccgactcccaccagtgcacctttgactataagaaggtggcacgggagcagatagccaagcagaatccagttgtgatggccgagaagataaacaagatctaatgaatggttgtgaagggattcatgcctgggttcctgagtcctcaagttcactataatcgataggttccttcgggtggtggtctgggttagcgtggtagtagggggtctcaattgtgtctatccttctcctttatcatggttccattctctgccggaaagatgcagtggttttgcgtcgtcacttcctctggaagtagtttaagtcgagaagataagattgcacatcaggtattgcttattctggtcctggagggccaagtgttgtatcgacatgtcattggttttgtatcgttgtatgttatcacgtgtgctggaaatcacagcaagtatgaagcttatctgatcctgctaccatcatgtttatgtgatcagatgaagttatagataagcatacatatc

SEQ ID NO: 467 - protein, 163 aa, Panicum virgatum
MAQESWKQESEETRVHAPEAPILCINNCGFFGSSMTNNMCSKCYRDFIKLMEAPVVEKKVTTSASSSTAPLETKRDDAPAAAATEAVAEKQAEQEPPKPPSNRCLTCRKKVGLTGFLCRCGDTFCSTHRYTDSHQCTFDYKKVAREQIAKQNPVVMAEKINKI

SEQ ID NO: 468 - protein, 171 aa, Oryza sativa
MEHKETGCQQPEGPILCINNCGFFGSAATMNMCSKCHKEMIMKQEQAKLAASSIDSIVNGGDSGKEPIIAGHAEVAVAQVEVKTLVAQPAEIAGPSEGVTVNPKGREGPNRCSTCRKRVGLTGFNCRCGNLYCAMHRYSDKHDCQFDYRTAARDAIAKANPVVKAEKLDKI

SEQ ID NO: 469 - protein, 159 aa, Aeluropus littoralis
MAQESWKQESHAPEAPILCINNCGFFGSSMTNNMCSKCYRDFVKLMEMDAPVVDKKLITTASSSTVPFETAKQDDTVPDAAAMDDKQPAQEPPKPPSNRCSTCRKKVGLTGFQCRCGGTFCSLHRYTDSHECTFDYKKVAREQIAKQNPVVIAEKINKI

SEQ ID NO: 470 - protein, 172 aa, Vitis vinifera
MESHDETGCQAPEGPILCINNCGFFGSAATMNMCSKCHKDLALKQEQAKLAASSIGSIVNGSSSGNGKEPIVAGTVDVQAGPVEVKAISAEASNDSSSNQIIESKVKEGPNRCTACRKRVGLTGFNCKCGNLFCAVHRYSDKHDCPFDYRTAARDAIAKANPVVKAEKLDKI

SEQ ID NO: 471 - protein, 171 aa, Citrus hybrid
MESHDETGCQAPEGPILCVNNCGFFGSAATMNMCSKCHKAMILNQEQAQLAASSIGSIVHGSSGGTGKEPIIAGSVDLQVGPVEIKKFSMEPSSGSSFGFAGVKAKEGPKRCTTCNKRVGLTGFNCRCGNLFCAVHRYSDKHGCPFDYRTAAREAIAKANPVVKAEKLDKI

SEQ ID NO: 472 - protein, 172 aa, Vitis vinifera
MDHNETGCQAPPEAPILCINNCGFFGSAATMNMCSKCHKDLVLKQEQAKLAASSFESIVEGSSNCNAKESMVAIAKADIIQTGPSESMPVPTQAACASPSETNDRVKEGPNRCSSCRKRVGLTGFNCRCGNIFCAVHRYSDKHACPFDYRTAARDAIAKSNPVIKPEKLDKI

SEQ ID NO: 473 - protein, 141 aa, Vitis vinifera
MEQKSQENEVNAAILCANNCGFFGSAATNNLCSKCYKEFVIKQSKEASVVENENNTVGENSGSGIEEGAAAGSPEKCPANRCSFCRKRVGLTGFKCRCGQTFCSMHRYSDKHNCVFDYKSAAQDAIAKANPVVKADKIEKI

SEQ ID NO: 474 - protein, 208 aa, Homo sapiens
MAQETNHSQVPMLCSTGCGFYGNPRTNGMCSVCYKEHLQRQNSSNGRISPPATSVSSLSESLPVQCTDGSVPEAQSALDSTSSSMQPSPVSNQSLLSESVASSQLDSTSVDKAVPETEDVQASVSDTAQQPSEEQSKSLEKPKQKKNRCFMCRKKVGLTGFECRCGNVYCGVHRYSDVHNCSYNYKADAAEKIRKENPVVVGEKIQKI

SEQ ID NO: 475 - protein, 223 aa, Canis lupus
MAQETNHSQVPMLCSTGCGFYGNPRTNGMCSVCYKEHLQRQNSSNGRISPPAASVSTLSESLPVQCTDGSVADAQLPLDSTSASVQPSPVSNQSLLSESVASSQVDSTSVDKAVPETEDLQGPRAEGLVPPEWDPPPSVSDTAQQPSEEQSKSLEKPKQKKNRCFMCRKKVGLTGFECRCGNVYCGVHRYSDVHNCSYNYKADAAEKIRKENPVVVGEKIQKI

SEQ ID NO: 476 - protein, 170 aa, Oryza sativa
MAQREKKVEEPTELRAPEMTLCANSCGFPGNPATNNLCQNCFLAASASSSSSSAAASPSTTSLPVFPVVEKPRQAVQSSAAAAVALVVERPTAGPVESSSKASRSSSVNRCHSCRRRVGLTGFRCRCGELYCGAHRYSDRHDCSFDYKSAARDAIARENPVVRAAKIVRF

SEQ ID NO: 477 - DNA, 894 bp, Gossypium hirsutum
gatctttctgataatcctttcctttgttcatattctccctttctgcttcttatttattttctttcaccttttcctttcaagatcgagagaaaaaagaatggcagaggagcatagatgccaagcgccagaaggccatcgtctttgcgtcaataactgcggctttttcggaagttcggcgacgatgaacctttgctccaaatgttacagagatctctgtctcaaggaacaggaagcttcttcgatcaaatccgctctttcctcttccccttcgtcttcatcaacggtcgtcgaatccatttctcaggttcctcttttggctctccatgaagtcaacagagaatcggcggttccggagattgcatcggcggccgaacagcgatcgcagcaacaaccgaatcggtgcatggtttgcaggaagcgggtcgggttgaccggattcagatgcaagtgcggtgttacgttttgtgggtcccacaggtaccctgagaatcacgggtgtacgttcgatttcaagaaggtcggcagagaggagatagcacgcgctaatcccctcgtcaaagcagagaagctcgagaagatttgagtagaagatgatgatgatgggaagccaagccattgggaaaatttcaaatttcatcaaacgttgataaggtcgagacacgtgtttcggaggtggtccctaccaccaagagtaaaccaattgggctggataaatatattttcttcttaaaatataaatattttataataatatttaaattatgtgcctctttagttttttttttttctcttcctcttttgctttgtaaaaaaaaaaaaagtcactttttcttttcttcttttaatcccttgtggtgaaaaaaagaaaaagaaatgtagattcctgcttcttcc

SEQ ID NO: 478 - protein, 161 aa, Gossypium hirsutum
MAEEHRCQAPEGHRLCVNNCGFFGSSATMNLCSKCYRDLCLKEQEASSIKSALSSSPSSSSTVVESISQVPLLALHEVNRESAVPEIASAAEQRSQQQPNRCMVCRKRVGLTGFRCKCGVTFCGSHRYPENHGCTFDFKKVGREEIARANPLVKAEKLEKI

SEQ ID NO: 479 - DNA, 814 bp, Gossypium hirsutum
gttcacattcttccttccaccttttcctttcaagatcgaaagattttttctttttttaaaaatggcggaggagcatagatgccaaacgccggaaggccaccgtctttgcgttaacaactgcggctttttcggaagtccggcgacaatgaatctttgctctaaatgttatagagatttccgtcttaaagaacaacagggagctacttccatcaaatcatctctttcttcctctccttcgttttcatcttcgtcagtcgttgtcgaatccgtttctcaggttccgctgttcaatctgcctgagttcattggagaatcgccagttcctgcagtggaggttgccctggtggctgagcaacggccgcaacagcaacaaccgaatcgatgcatggtttgcaggaaacgggtcgggttgaccgggttcaggtgcaaatgcgagattacattttgcgggtcccataggtatccagagaatcacgggtgtaccttcgatttcaaggaggttgggagagaggagattgcacgcgcaaatccactggtcaaagcagagaagctggagaagatttgagatgaaagtggaaagccattggatccctcgactttcgatgaaataaaaaaaaaaaagcaaatgaaaatgatctctttaagattgcgacacgtgtttagatgtagtccccaccatgaagagaaaccaattaggctggataaaattattttcatcctaataggttttcttaaaatatatataatattttaatttatgtgcctcttttagtctttctcttttgtaaaaaaagacttttttttttttcttttc

SEQ ID NO: 480 - protein, 167 aa, Gossypium hirsutum
MAEEHRCQTPEGHRLCVNNCGFFGSPATMNLCSKCYRDFRLKEQQGATSIKSSLSSSPSFSSSSVVVESVSQVPLFNLPEFIGESPVPAVEVALVAEQRPQQQQPNRCMVCRKRVGLTGFRCKCEITFCGSHRYPENHGCTFDFKEVGREEIARANPLVKAEKLEKI

SEQ ID NO: 481 - DNA, 662 bp, Gossypium hirsutum
ctgatctttctttctgataatcctttcctttgttcatattctccctttctgcttcttatttattttctttcaccttttcctttcaaggtacttctctttctcaccctattattttgtatttcgctgttcctctagtttgattttatgatttgaattttagattgtagatctgatctttaagaaaattaaatttaacagatcgagagaaaaaaagaatggcagaggagcatagatgccaagcgccagaaggccatcgtctttgcgtcaataactgcggctttttcggaaattcggcgacgatgaacctttgctccaaatgttacagagatctctgtctcaaggaacaggaagcttcttcgatcaaatccgctctttcctcttccccttcgtcttcgtcaacggttgtcgaatctatttctcaggttcctcttttggctctccctgaagtcaacagagaatcggcggtcccggagattgcaccggcggccgaacagctatcgcagcaacaaccgaatcggtgcatggtttgcaggaagcgggtcgggttgaccggattcagatgcaagtgcggtgttacgttttgcgggtcccacaggtaccctgagaatcacgggtgtacgttcgatttcaagaaggtcggcagagaggagatcgcacgcgct

SEQ ID NO: 482 - protein, 149 aa, Gossypium hirsutum
MAEEHRCQAPEGHRLCVNNCGFFGNSATMNLCSKCYRDLCLKEQEASSIKSALSSSPSSSSTVVESISQVPLLALPEVNRESAVPEIAPAAEQLSQQQPNRCMVCRKRVGLTGFRCKCGVTFCGSHRYPENHGCTFDFKKVGREEIARA

SEQ ID NO: 483 - DNA, 878 bp, Gossypium hirsutum
tcgttgtttcctccttcccttctatcctctcatcccctcttccctttaataagaggcttcttttctgataattctttgctttgttcatagtttcccttcaaaattcagagatcttgcagatctgattttcaaaaataaaaaattaaaggcaaatatcaagagatttcgaagaaaaacaagaaaagatggcggaggaacatagatgccaagcgccggaaggtcaccgtctttgtgttaataactgtggtttcttaggaagtccggcgacgatgaatctttgttctaaatgttacagagatttccgtcttaaagaacaacaacaagcttcttcggctaaatcgtctatctctacctctccttcatcttcgtcaactgcagtcgaatctgtttctcaggtacctctcctgactctccctgaagtcaaaggagttccgccggttgtttcggctgtcgcgatctctccggtgacggaacagaaaccacaacagcaacagcaacaacaacaacaaccgactcggtgcacggtttgcaggaaacgggtcgggttgaccggattcaagtgcaagtgcgggattacgttttgcgggtcacacaggtacccggaaaatcatggatgcacgttcgatttcaagaagattgggcgagaggagattgcacgtgccaatcccgtggtcaaagcagagaagatcgtgaggatttgagaagaagaagatggaaagccgatcgatcctttgacttttaatgagtaaaagaaaaagagaaatagaaattgtcaaactcgttaagattgcgacacgtgtttcggtgttggtccccatacctttaaaaattgggcttggataaaaatattttatcttataaaataagtcttctatttt

SEQ ID NO: 484 - protein, 171 aa, Gossypium hirsutum
MAEEHRCQAPEGHRLCVNNCGFLGSPATMNLCSKCYRDFRLKEQQQASSAKSSISTSPSSSSTAVESVSQVPLLTLPEVKGVPPVVSAVAISPVTEQKPQQQQQQQQQPTRCTVCRKRVGLTGFKCKCGITFCGSHRYPENHGCTFDFKKIGREEIARANPVVKAEKIVRI

SEQ ID NO: 485 - DNA, 912 bp, Gossypium hirsutum
gtactcttttcgtcgttgtttcctccttcccttttatcctctcatcccctctaccctttaataagaggcttcttttcttataattctttgctttgttcatattttcccttcaaaattcagagatcttgcagatctgattttcaaaaaccaaaaattaaaggcaaatatcaagagatttcgaagaaaaacaagaaaagatggcggaggaacatagatgccaagcgccggaaggtcaccgtctttgtgttaataactgtggtttcttaggaagtccggcgacgatgaatctttgttctaaatgttacagagatttccgacttaaagaacaacaacaagcttcttcggctaaatcgtctatctctacctctccttcatcttcgtcaacggcagtcgaatctgtttctcaggtacctctcctgactctccctgaagtcaaaggagttccgctggttgtttcggctgtcgcgatctctccggtggcggaacagaaaccacaacagcaacagcaacagcaacagcaacaacaacaacaacaacagcaaccgactcggtgcactgtttgcaagaaacgggtcgggttgaccggattcaagtgcaagtgcgggattacgttttgcgggtcacacaggtacccggaaaatcatggatgcacgttcgatttcaagaagattgggcgagagaagattgcacgtgccaatcccgtggtcaaagcagagaagatcgtgaggatttgagaagaagaagatggaaagccgattgaccctttgacttttaatgagtaaaagaaaaaaagagaaatagaaatgtcaaactcgttaagattgcgacacgtgtttcagtgttggtccccatacctttaaaaattgggcttggataaaaatattttatcttataaaataagtcttctatttt

SEQ ID NO: 486 - protein, 178 aa, Gossypium hirsutum
MAEEHRCQAPEGHRLCVNNCGFLGSPATMNLCSKCYRDFRLKEQQQASSAKSSISTSPSSSSTAVESVSQVPLLTLPEVKGVPLVVSAVAISPVAEQKPQQQQQQQQQQQQQQQQPTRCTVCKKRVGLTGFKCKCGITFCGSHRYPENHGCTFDFKKIGREKIARANPVVKAEKIVRI

SEQ ID NO: 487 - DNA, 569 bp, Gossypium hirsutum
ccttctgattataataagatttgggtttcgttatcctctgaaactctcgtctctggtttgaaaggagattgaaaaaatatggctgaagaacatagatgtcaagcaccacagttatgtgccaacaactgtggatttttcggaagcccgacgactcaaaatctctgctctaaatgttatcgcgatcttcaacttaaagaacaacaatcttcctctgccaaacaagcctttaatcacactttcgttccttcgtcgtcttcattgccatcgtcatcatcggcccgatcttcgttttcggcatccttgccggtggaggatgaaccatcggcgggaacgaaggaaacgaaggtggtggagggggaggaagttcaggttacgccaaacagatgcttgagttgcaagaaacgcgtggggctcacggggttcaagtgcaggtgcgggatggttttttgtgggatccataggtaccctgaacaacatgcttgtacttttgatttcaaagggatgggaaaacaacaaatcgccaaagctaatcctcttgttaagggtgagaagcttcaaaaaatataaat

SEQ ID NO: 488 - protein, 162 aa, Gossypium hirsutum
MAEEHRCQAPQLCANNCGFFGSPTTQNLCSKCYRDLQLKEQQSSSAKQAFNHTFVPSSSSLPSSSSARSSFSASLPVEDEPSAGTKETKVVEGEEVQVTPNRCLSCKKRVGLTGFKCRCGMVFCGIHRYPEQHACTFDFKGMGKQQIAKANPLVKGEKLQKI

SEQ ID NO: 489 - DNA, 931 bp, Gossypium hirsutum
atttttcctcgtttactttatcttcttctttccattctgattataataagatttgggtttcgttttcctgtgaaactctcgtctctggtaaattttccctcggttttttttgggggtttatttttatttgtcatgaacctatggctttttatttgatttctgttaaacggggggtttttttttataggtttgaaaggagattgaaaaaatatggctgaagaacatagatgtcaagcaccacagttatgtgccaacaactgtggattcttcggaagcccaacgactcaaaatctctgttctaaatgttatcgcgatcttcaacttaaagaacaacaatcttcctctgccaaacaagcctttaatcacactttagttccttcgtcgtcttcattgccatcgtcatcatcggcccgatcttcgttttcggcatccttgccggcgaaggaggaaccatcggcgggaacgaaggaaacgaaggtggtggaggaggaggaagttcaggttacgccaaacagatgcttgagttgcaagaaacgcgtggggctcacggggttcaagtgcaggtgcgggatggttttttgtgggatccataggtaccctgaacaacatgcttgtgcttttgatttcaaagggatgggaaaacaacaaatcgccaaagctaatcctcttgttaagggtgagaagcttcaaaaaatataaataaaattgactgaaggaaaaaaaagggggggggatgggtttttttccgattgtgtctgtcaaatttaagaatctgggtcatcggaaaactgatgaaatttagattgatgatgggatctagccggtcggtggccggtcaagcagtaggaagtgttttaggtggttgtcgttgttgcctataaatggtataattcacgttttcttaaattatatcgtcaatgttggttttccg

SEQ ID NO: 490 - protein, 162 aa, Gossypium hirsutum
MAEEHRCQAPQLCANNCGFFGSPTTQNLCSKCYRDLQLKEQQSSSAKQAFNHTLVPSSSSLPSSSSARSSFSASLPAKEEPSAGTKETKVVEEEEVQVTPNRCLSCKKRVGLTGFKCRCGMVFCGIHRYPEQHACAFDFKGMGKQQIAKANPLVKGEKLQKI

SEQ ID NO: 491 - DNA, 662 bp, Gossypium hirsutum
catttcttgtttaattctctctgaaactctcaggtcaggtaattttctttttccttttagagaattgaaaaaaaaagaaaaaaaaagaagatatcagatatggcagaagaacatagatgtcaagcaccaccacaatgtgcaaacaattgtggattcttcggaaacccagcaacccaaaatctttgttctcaatgttaccgccatctccagcaccttaaagaacaaggatcttcctctgctgccaaacaggcttttaatcaagcccccctcccttccttttcttcttcatcatcgtcgttttcggtttccttggcggtgaagcatgaaccgttggcggaaaccaaggaagaggtggtccaagcggaggttcaggtccacgttcaagttcgacctaacagatgcatgacttgcaggaagcgcgtggggctgacggggttcaagtgcaggtgtgggatggtgttttgtggcacccataggtaccctgaaaatcatggttgtagtttcgatttcaaagggatgggaaaacaacagattgccaaatcgaatccggttgtcaaaggcgagaagcttcagaaaatctaaaggaaaaaggggtattgtacgaatgatgttgcgttagtatgtgatttgaacatcaatttattaattaattttgggttttt

SEQ ID NO: 492 - protein, 160 aa, Gossypium hirsutum
MAEEHRCQAPPQCANNCGFFGNPATQNLCSQCYRHLQHLKEQGSSSAAKQAFNQAPLPSFSSSSSSFSVSLAVKHEPLAETKEEVVQAEVQVHVQVRPNRCMTCRKRVGLTGFKCRCGMVFCGTHRYPENHGCSFDFKGMGKQQIAKSNPVVKGEKLQKI

SEQ ID NO: 493 - DNA, 1118 bp, Gossypium hirsutum
aaaaccaaaccaaaacctttggtttggtttttagttttgttaattatttttcgagtttcggtttcgtttttgttttcccatttgttgtattctattttcttctcctgttgttctccaccaagaaaggaatcagggttcctctgctgtttctataaatcatttctcaattccctttcttttttttagtcagattctggatttggaaaaaaaaatatcttctctgtcttcggatttcctcacgttttcttaaatcatcgatcaacgccgacctagaacaagaataaaacgaggaacaaacaacctctgattgtcgaattaacgagaaaccaaaagcaaacgcataaagaaatcatgggttctgaacagaatgaaggaactagcttccctccatcggagccaaaactttgtgccaacggctgtgggtttttcggcacggcggcgaatatgaacctctgttccaagtgttaccgggacctccgtgccggggaggagcaagctgccaaggcgaaagctgccatggagaaatccctcagcgttaatacgaagcaggaagatgtcgttgacgagactgtgaagcctgttcttgagcttcctcatgtgggttcctcatcgacggtggtcgagaaacaaccggctgctattgtctccgatgataaaccggcggaacccaaggcggcgaacaggtgctttatctgcagaaagaaggttggattgaccgggttcaagtgcaagtgcgggagtacattctgcggcgagcatcgttacgcggaaaaacatgattgctcctttgatttcaagggtactggacgtgatgcgattgccaaagcaaatcccgtcgttaaagctgacaaggttgagaggatttaaaaaagtattagtgggttgttccacttggttctttgaatggatttcccttttttttttgttctctatcggggatcagttaggtttaggataacaggaaaaattgcggggtgttttgatgtcgttgctagtgtcggggcagctttgtttgattccataataaaaaatggtatcaatgaatgtttagctttcagtttttacttggaatgtttctggctttgatctttcattatatccatatttcagtttatgtt

SEQ ID NO: 494 - protein, 171 aa, Gossypium hirsutum
MGSEQNEGTSFPPSEPKLCANGCGFFGTAANMNLCSKCYRDLRAGEEQAAKAKAAMEKSLSVNTKQEDVVDETVKPVLELPHVGSSSTVVEKQPAAIVSDDKPAEPKAANRCFICRKKVGLTGFKCKCGSTFCGEHRYAEKHDCSFDFKGTGRDAIAKANPVVKADKVERI

SEQ ID NO: 495 - DNA, 856 bp, Gossypium hirsutum
aatttagcttttgaccctttctaaaagaatccatcaacaaaaaaatccttaattttgttcatctttgattgtagaaaaatcaaaagcaaaaagcttgccgaattagaaaaagaaattatgggttctgaacagaatgaaggaacaagctttccaccatcggagccaaagctttgtgccaacggttgtgggtttttcgggacggcggcgaatatgaatttatgttcaaagtgttaccgggacctccgtgttggggaggagcaagcggcgaaggcgaaagctgttatggagaaatctctcagtatcaaaacgaagcatgaacctgtcgttgtggagacttttaagcctcatgtgggttcttcgtctacatcgattgagcaacaacaaccggctgttgttgccgttaatcaacaaccggaaccaaaggcggcgaacaggtgttttatttgtaggaaaaaggttgggttaactgggtttaagtgcaggtgcgagaatacattctgtggggagcatcggtacccagaaaaacacgagtgttcatttgatttcaagggtgttggacgtgatgccattgctaaggcaaatcccgttgttaaagctgataaggtggagaggttctgaaaggtgggggagttgtttgttggatgaatgtgtttcttgccttttcttacttcctatctcggggttatcgagagagcagttagatttagggtcaatggaaatattgtggggtgatttactgatttatgttgttgctggtgtttttgttggggttgtgggatatgatttgggagggggagggggatgttttaagggtgaatgcaaaatggatcaatgaatgtttttagttttcattttt

SEQ ID NO: 496 - protein, 166 aa, Gossypium hirsutum
MGSEQNEGTSFPPSEPKLCANGCGFFGTAANMNLCSKCYRDLRVGEEQAAKAKAVMEKSLSIKTKHEPVVVETFKPHVGSSSTSIEQQQPAVVAVNQQPEPKAANRCFICRKKVGLTGFKCRCENTFCGEHRYPEKHECSFDFKGVGRDAIAKANPVVKADKVERF

SEQ ID NO: 497 - DNA, 1023 bp, Gossypium hirsutum
agagagtctccgtttcgagtttggttttttaatatttgtttcactttttcagtttcgtccttgtgtctcccctcctttcggtttctctccgccccccccccaataaaaacgaaattcagggaattaaattccctataaaatcgtttctcgtaaatttccttttcgttttaaatcaaacccgatttcctggtttctttttcttcatcgatcgtcgccggcggaaaaacaagaaaaatcaaaagcaaaaagcttgcagaattagaaaaaaaattatgggttctgaacagaatgaaggaacaagctttccaccatcggagccaaagctttgtgccaacggttgtgggtttttcgggacggcagcgaatatgaatttatgttcaaagtgttaccgggacctccgtgttggggaggagcaagcggcgaaggcgaaagctgttatggagaaatctctcagtatcaaaacgaagcatgaacctgtcgttgtggagacttttaagcctcatgtgggttcttcgtctacatcgattgagcaacaacaaccggctgttgttgccgttaatcaacaaccggaaccaaaggcggcgaacaggtgttttatttgtaggaaaaaggttgggttaactgggtttaagtgcaggtgcgagaatacattctgtggggagcatcggtacccagaaaaacacgagtgttcatttgatttcaagggtattggacgtgatgccattgctaaggcaaatcccgttgttaaagctgataaggtggagaggttctgaaaggtgggggagttgtttgttggatgaatgtgtttcttcccttttcttactgcctatctcggggttatcgagagagcagttagatttagggtcaatggaaatattgtggggtgatttactgatttatgttgttactggtgtttttgttggggttggggttggggttgtgggatatgatttgggagggggagggggatgttttaagggtgattgaaaaatggatcaatgaatgtttctagttttcattttt

SEQ ID NO: 498 - protein, 166 aa, Gossypium hirsutum
MGSEQNEGTSFPPSEPKLCANGCGFFGTAANMNLCSKCYRDLRVGEEQAAKAKAVMEKSLSIKTKHEPVVVETFKPHVGSSSTSIEQQQPAVVAVNQQPEPKAANRCFICRKKVGLTGFKCRCENTFCGEHRYPEKHECSFDFKGIGRDAIAKANPVVKADKVERF

SEQ ID NO: 499 - DNA, 684 bp, Gossypium hirsutum
cttttgaaccaaacaccccccctaatcagaaccctaactttttttttcttctaatctttgattgtagaaaccaaaagcaaacgcgtaaagaaatcatgggttctgaacagaatgaaggaactagcttccctccatcggcgccaaaactttgtgccaacggctgtgggtttttcggcacggcggcgaatatgaacctctgttccaagtgttaccgtgacctccgtgccggggaggagcaagctgccaaggcgaaagctgccatggagaaatccctcagcgttaatacgaagcaggaagatgtcgttgacgagactgtgaagcctgttcttgagcttcctcatgtgggttcctcatcgacggtggtcgagatacaaccggctgctattgtctccgatgataaaccggcggaatccaaggcggcgaacaggtgctttatctgcagaaagaaggttggattgaccgggttcaagtgcaagtgcggaagtacattctgcggcgagcatcgttacccggaaaaacatgagtgctcctttgatttcaagggtactggacgtgatgcgattgccaaagcaaatcccgtcgttaaagctgacaaggttgagaggatttaaagaagtattagtgggttttccacttggttctttgaatggatttcccttttcttttctttttttgtttctctat

SEQ ID NO: 500 - protein, 171 aa, Gossypium hirsutum
MGSEQNEGTSFPPSAPKLCANGCGFFGTAANMNLCSKCYRDLRAGEEQAAKAKAAMEKSLSVNTKQEDVVDETVKPVLELPHVGSSSTVVEIQPAAIVSDDKPAESKAANRCFICRKKVGLTGFKCKCGSTFCGEHRYPEKHECSFDFKGTGRDAIAKANPVVKADKVERI

SEQ ID NO: 501 - DNA, 695 bp, Gossypium hirsutum
gaactttggctgtttcagattttccgtgaaaatcaagaaggaaaaaaaacccttaaaatcaaaaccctaatcctatttttttttcctttttgattgtggaaaacaaagcaagccctcaactggacaacatggggtctgaacagaatcaaggaaccagctttcccccgtcggagccgaagctttgcgctaacggttgcgggtttttcggaacggcggcgaacatgaacctctgctccaagtgttaccgggacctccgtgctggggaggagcaagcggcgaaggcgaaagctgccatggagaaatcccttagcgtcaaaccgaaagaagatgtcgttgtggagacgtttaagcccgttgagaagctgcctcatgcgggttcatcatcagcggcggttgagcaaccggccgtggctctctccggcgatgaacagcccgagccaaaattgtcgagccggtgctttatctgcagaaagaaggttggattgactgggtttaagtgccgatgcgggagtgcgttctgtggggagcaccggtacccagaaaaacacgagtgctccttcgatttcaagggcactggacgcgatgcgattgccagtgcaaatcccgtcatcaaagctgacaaattggagaggttttgaaaggtggggagcttggagtcagtttgcctgaatcgtgttcttcaatgggtttgcctt

SEQ ID NO: 502 - protein, 169 aa, Gossypium hirsutum
MGSEQNQGTSFPPSEPKLCANGCGFFGTAANMNLCSKCYRDLRAGEEQAAKAKAAMEKSLSVKPKEDVVVETFKPVEKLPHAGSSSAAVEQPAVALSGDEQPEPKLSSRCFICRKKVGLTGFKCRCGSAFCGEHRYPEKHECSFDFKGTGRDAIASANPVIKADKLERF

SEQ ID NO: 503 - DNA, 962 bp, Gossypium hirsutum
aaatcccaaaaaataaatcataccacccaaaattttctctcttctcttctcgtctcggtttgcataaatctcttcggtttaggaactgccggggttccattttgtcatcaagatcggccaaattaaaatttcaggcgatcggagaagatggactctcatgatgaaactgggtgccaagctccagaaggtcccatcctgtgcgtcaacaactgcggcttctttggaagtgcggctaccatgaatatgtgctccaagtgtcacaaggcaatgattctgaagcaggaacaggtgcaacttgcagcagcatccattggaagcattgttaatggctgctctagtggtagcagtaaggaaccagctgtggctgctgctttggatgtacaacctgtaaatattgagtcaaagattgtgtcagcagagccatccattgatccttctagaacaaccgtcagtgagttggagacaaaaaagggtcctaataggtgctcaacatgccataagcgtgttggtttgacaggatttaactgcaggtgtggaaacctcttctgtgcagctcatcgttactcagacaaacacgagtgcccttttgattaccaggccgctgctcgtaatgctatttctaaagccaaccctgtagtcagagctgagaaactggataaaatctaagggtcctggatgaaggtgaagatttgtgtagtcaaatatgatgattctccctctattccttgtgtattgggcccattgtagtgaaggtttataagttgggtgcttgtctccccatgttagggaagacatggttgcagtgtaagtcttatattccatgtcaatcggttggcattacaatggctcatgtttgtaagactttgtttgtgctggtttgatggacaacgatacgattgaacaccatggtaatgcttctttgtggtatacacatttctttatactagtagctcggctatatc

SEQ ID NO: 504 - protein, 172 aa, Gossypium hirsutum
MDSHDETGCQAPEGPILCVNNCGFFGSAATMNMCSKCHKAMILKQEQVQLAAASIGSIVNGCSSGSSKEPAVAAALDVQPVNIESKIVSAEPSIDPSRTTVSELETKKGPNRCSTCHKRVGLTGFNCRCGNLFCAAHRYSDKHECPFDYQAAARNAISKANPVVRAEKLDKI

SEQ ID NO: 505 - DNA, 936 bp, Gossypium hirsutum
aaaaaaaaatccaaaaagaaaaatcatacgatcaaagatcgtctttctcgtctggatttctccgattatcatacataaaactcttcgattaagagatcactgttttcgattttgttagacaagatcggccgattagaatttcaggggattagagaagatggagtctcacgatgagacagggtgccaagccccagaaggccccattctttgtatcaacaactgtggcttcttcggcagtgcagctaccatgaatatgtgctccaagtgtcacaaagcaatgatcctgaagcaggaacaggcgcaacttgcagcatcatcaatcggaagcatcgtgaatggcagctcaactgggaacagtaaggaaccagccgtggctactgctttggatgtacaatctggaaacgccgacaccaaaatggtctcaacagagctacccattgacccatccggaaagacttcatgtgggatgaaaacgaaagagggtcctaacaggtgtaccaaatgctgtaaacgtgttggtctgacaggatttaactgcaggtgtggaaacctcttctgtgcagctcatcgttactccgacaaacatgactgccctttcgattaccgagctgctgctcgcgatgctattgctaaagccaacccagttgttcgggcagagaagctcgataaaatctgagaacaacccggatcaagatgaagatatgtggatggtttatgtaagttggttacttgtctcatcaagtgtccccttgattgatattaaatgttgggagtccatcatagggaatgttgggagtccatcatagggagggacatgatttgcattgtaagtctatattttcccctgtttgtaagtgtttttatttgtgcttgtttgatggacattgatatgatcaacttgtaatgcttcttctttgtggtatgcattttttttct

SEQ ID NO: 506 - protein, 172 aa, Gossypium hirsutum
MESHDETGCQAPEGPILCINNCGFFGSAATMNMCSKCHKAMILKQEQAQLAASSIGSIVNGSSTGNSKEPAVATALDVQSGNADTKMVSTELPIDPSGKTSCGMKTKEGPNRCTKCCKRVGLTGFNCRCGNLFCAAHRYSDKHDCPFDYRAAARDAIAKANPVVRAEKLDKI

SEQ ID NO: 507 - DNA, 906 bp, Gossypium hirsutum
aaaataaaatccaaaaagaaaaatcatacgatcaaagatcgtctttctcgtctggatttctccgattatcatacataaaactcttcgattaagtgatcactgggttcgattttgttagacaagatcggccgattaggatttcagtttcctagcaggggattagagaagatggagtctcacgatgagacagggtgccaagccccagaaggccccattctttgtatcaacaactgtggcttcttcggcagtgcagctaccatgaatatgtgctccaagtgtcacaaatcgatgatcctgaagcaggaacaggcgcaacttgcagcatcatcaatcggaagcatcgtgaatggcagctcaactgggaacggtaaggaaccagccgtggctactgctttggatgtacaatctggaaacgccgacaccaaaatggtctcaacagagctacccattgacccatccggaacgacttcatgtgggatgaaaatgaaagagggtcctaacaggtgtaccaaatgctgtaaacgtgttggtttgacaggatttaactgcaggtgtggaaacctcttctgtgcagctcatcgttactccgacaaacatgactgccctttcgattaccgagctgctgctcgcaatgctattgctaaagccaacccagttgttcgggcagagaagctcgataaaatctgagaacaacccgggtcaagatgaagatatgtggatggtttatgtaagttggttacttgtctcatcaagtgtccccttgattgatattaaatgttgggagtccatcatagggagggacatgatttgcattgtaagtctatattttcccgtttgtaagtgtttttatttgtgcttgtttgatggacattgatatgatcaacttgtaatgcttcttctttgtgg

SEQ ID NO: 508 - protein, 172 aa, Gossypium hirsutum
MESHDETGCQAPEGPILCINNCGFFGSAATMNMCSKCHKSMILKQEQAQLAASSIGSIVNGSSTGNGKEPAVATALDVQSGNADTKMVSTELPIDPSGTTSCGMKMKEGPNRCTKCCKRVGLTGFNCRCGNLFCAAHRYSDKHDCPFDYRAAARNAIAKANPVVRAEKLDKI

SEQ ID NO: 509 - DNA, 516 bp, Gossypium hirsutum
atggagtctcatgatgagactggatgccaggctccagagggccccatcctctgcatcaataactgcggcttctttggaagtgctgctacaatgaacatgtgctccaagtgccacaaggacataatcctgaagcagcaacaggctcaattggcagcatcatccatcgagagcattgtgaatggcaactctagcggaaatggaaaagaacctgtggttgctgttgctgttgatgtacagtctgcaccagtagaggtgaaaatcatctctacagaaccatcaagtgcaacttcaagcaagccttctgagatgaaggcaaaagagggacccagtaggtgtacctcttgccgaaagcgtgtcggtttaacagggttcagttgtagatgtggaaacctgttctgtgcagttcatcgctactctgataagcataactgtcgctttgattatcggaatgctgctcgggatgctattgctaaagccaacccagttgtcagggcagagaagctggataaaatctaa

SEQ ID NO: 510 - protein, 171 aa, Gossypium hirsutum
MESHDETGCQAPEGPILCINNCGFFGSAATMNMCSKCHKDIILKQQQAQLAASSIESIVNGNSSGNGKEPVVAVAVDVQSAPVEVKIISTEPSSATSSKPSEMKAKEGPSRCTSCRKRVGLTGFSCRCGNLFCAVHRYSDKHNCRFDYRNAARDAIAKANPVVRAEKLDKI

SEQ ID NO: 511 - DNA, 513 bp, Gossypium hirsutum
atggagtctcatgatgagactggatgccaagctccagagggccccatcctctgcattaacaactgtggcttctttggaagtgctgctaccatgaacatgtgttccaagtgccacaaggacatcatcctgaaccagcaacaagcccaactggcagcatcatccattgaaagcattgtgaatggaaactctagcgggaatggaaaagaacctgtggttgctggtgccgttgatgtacaagctgcacctgtagaggtgaaaatcatctccacagaaccatccattgcttcaagcaagccttctgagatgaaggcaaaagagggacctagtaggtgtaccgcttgccgaaagcgtgttggtttaacaggtttcggttgtagatgtggaaacctgttctgtgcaattcatcgttactctgacaagcatgactgtccctttgattatcggactgctgctcgtgatgctattgctaaagccaacccagttgtcaaggcagagaagcttgataagatctaa

SEQ ID NO: 512 - protein, 170 aa, Gossypium hirsutum
MESHDETGCQAPEGPILCINNCGFFGSAATMNMCSKCHKDIILNQQQAQLAASSIESIVNGNSSGNGKEPVVAGAVDVQAAPVEVKIISTEPSIASSKPSEMKAKEGPSRCTACRKRVGLTGFGCRCGNLFCAIHRYSDKHDCPFDYRTAARDAIAKANPVVKAEKLDKI

SEQ ID NO: 513 - DNA, 444 bp, Gossypium hirsutum
tatgggagccaagcaacagaaaatctttgttccaagtgttaccgtgatcttcatcaatcacagcccttgaatcatcagctgctaaacccatcatcatcatcggctgcttctgtttcctcctttgcatccccagccgttgatgttctaaaagtcaacaccaaccagaaagctcctgttgtggtggtgggagatgataaaaaagatgaggtaaaggcaggagagcctgcggctgggaagcagcagcagcataagccaaataggtgcttgacgtgtaggaggcgcgtggggttgacggggttcaagtgcaggtgtggtatggtgttttgtggaacacataggtacccggaacagcatgattgcgaatttgattttaagagtttagggaaacaacagattgctaaggctaatcccgttgttaagggagagaaactccaaaaaatttaa

SEQ ID NO: 514 - protein, 167 aa, Gossypium hirsutum
MAEEQHRCQEQRLCVNNCGFYGSQATENLCSKCYRDLHQSQPLNHQLLNPSSSSAASVSSFASPAVDVLKVNTNQKAPVVVVGDDKKDEVKAGEPAAGKQQQHKPNRCLTCRRRVGLTGFKCRCGMVFCGTHRYPEQHDCEFDFKSLGKQQIAKANPVVKGEKLQKI

SEQ ID NO: 515 - DNA, 519 bp, Populus trichocarpa
atggaccatgacgagacaggatgccaagctcctccagaaggtcctattttgtgtactaacaattgtggcttctttggaagtgcagctactatgaacatgtgttcaaagtgccacaagggtatgctgttaaaacaggagcaggctaatcttgctgcgtcatctattggaagtattgtgaatggatcatcaagcagcaatgtttttgaacctgttattgctgacatcattgatgtccaaaacaatgcagtggagcctaagaccatcactgtgcagccatcctgtgcttcaggctcaggggagagggttgaggcaaagccgaaggagggtccaaaccggtgcacctcttgcaagaaaagagttggtttaacagggttcaagtgtcgatgtggtagcctcttttgtgcatctcatcgctactcagataaacatgactgcccatttgattatcgttctgctgcccgtgaagcaatagcaaaagccaaccctgttgtcaaggcagagaagcttgataaaatctaa

SEQ ID NO: 516 - protein, 172 aa, Gossypium hirsutum
MDHDETGCQAPPEGPILCTNNCGFFGSAATMNMCSKCHKGMLLKQEQANLAASSIGSIVNGSSSSNVFEPVIADIIDVQNNAVEPKTITVQPSCASGSGERVEAKPKEGPNRCTSCKKRVGLTGFKCRCGSLFCASHRYSDKHDCPFDYRSAAREAIAKANPVVKAEKLDKI

SEQ ID NO: 517 - DNA, 519 bp, Populus trichocarpa
atggaccgtgacgagacaggatgccaagctcctccagaacgtcctattttgtgcattaacaattgtggcttctttggaagtgcagctactatgaacatgtgttcaaagtgccacaaggatatgctgttaaaacaggagcagactaagcttgctgcatcatcaattggaagtattgtgaatggatcggcaagcagcaatgtgaatgaacctgttattgctgacaccattaatgtccaaatcaatgcagtggagcctaagaccatcactgtgcagccatcctgtgcttcagtttcaggggagagagttgaggcaaagccgaaggaggggccaagccggtgcacctcttgcaagaaaagagttggtttaacagggtttaagtgtcgatgtggtgacctcttttgtgcatctcatcgctactcagacaaacatgactgcccatttgattaccgtactgctgcccgtgaagcaatagcaaaagccaatcctgttgtcaaggcagagaagcttgataaaatctga

SEQ ID NO: 518 - protein, 172 aa, Populus trichocarpa
MDRDETGCQAPPERPILCINNCGFFGSAATMNMCSKCHKDMLLKQEQTKLAASSIGSIVNGSASSNVNEPVIADTINVQINAVEPKTITVQPSCASVSGERVEAKPKEGPSRCTSCKKRVGLTGFKCRCGDLFCASHRYSDKHDCPFDYRTAAREAIAKANPVVKAEKLDKI

SEQ ID NO: 519 - DNA, 525 bp, Populus trichocarpa
atgggttctgagcaaaacgatggcacaagcttcccaccagcagagccaaagctttgtgttaatgggtgtggattttttggtacggctgcaaacatgaacctttgctccaagtgttaccgtgaccttcgtgccgaagaagagcaagctgcctctgccaaggctgccatggaaaagacactgaatatcaatccaaaacaaaatattgattctaaggttgttgtcgatgcccctcaagttgtggtggctaattccgtgcagtcagttgtgtctgctgaagcttcttcgtcagcagaaactgttgttgctggtggtgatcaggtgccatcaaagccggcaaataggtgctttagctgcagtaagaaggttggtttgacaggattccagtgcaagtgcggtggcacttactgcgggactcataggtacgcagagaatcacgagtgcctctttgatttcaaaggtgctggccgtgatgcaatcgcgaaggcaaatcctgtgattaaggctaataaggtggagaggttctga

SEQ ID NO: 520 - protein, 174 aa, Populus trichocarpa
MGSEQNDGTSFPPAEPKLCVNGCGFFGTAANMNLCSKCYRDLRAEEEQAASAKAAMEKTLNINPKQNIDSKVVVDAPQVVVANSVQSVVSAEASSSAETVVAGGDQVPSKPANRCFSCSKKVGLTGFQCKCGGTYCGTHRYAENHECLFDFKGAGRDAIAKANPVIKANKVERF

SEQ ID NO: 521 - DNA, 471 bp, Populus trichocarpa
atggagcaagaatcccaaaagagaaagctagaagacagcagcagtaacgaggcacaaaacacgccaattctttgtgtgaataactgtggtttttttggaagccccaacactaataatctctgctctaaatgttacaaagaattccttctaacccaacaagacacaactacaacaacaattgatgttccagttcatgttgccgaaaacagtgcagcagcagcagcagaagttgaagggcaacaagaaggaggtgaagaggagaagcggccggtggtggtggcaaacaggtgcaacttctgcaggaaaaaagtgggcttgacagggttcaagtgccgttgtggatacactttctgttcgcagcacagatattcggacaagcataactgtgtgttcgattacaagagtgctggacaggatgctattgctaaagccaatcctgttgtcaaggcagataagattgataagatatga

SEQ ID NO: 522 - protein, 156 aa, Populus trichocarpa
MEQESQKRKLEDSSSNEAQNTPILCVNNCGFFGSPNTNNLCSKCYKEFLLTQQDTTTTTIDVPVHVAENSAAAAAEVEGQQEGGEEEKRPVVVANRCNFCRKKVGLTGFKCRCGYTFCSQHRYSDKHNCVFDYKSAGQDAIAKANPVVKADKIDKI

SEQ ID NO: 523 - DNA, 516 bp, Populus trichocarpa
atgggttctgagcaaaacgaaggtacaagctttccatcgtcacagccacagctttgtgctaatggatgtggtttttttggcacggctgcaaacatgaacctttgctccaagtgttaccgtgaccttcgtgctgaagaagagcaagctgcctttgctaaggctgctatggaaaagacgctaaacatgaagtcacaacaacatattgactctagggttgctgttgatgcccctcaagttgcggtggctaattccatgcaatccgctgaagcctcttcttcggcagaaactgctgttgctgctggcgatcaggtgtcatcgaagccggcaaataggtgcttcagctgcaataagaaggttggcttgacaggattcatgtgcaaatgcggtggcacatactgtgggactcataggtactctgagaatcacgagtgctccttcgatttcaagggtgctggccgtaatgctattgccaaggcgaatcctgtgattaaggctgataaggtggggaggttctga

SEQ ID NO: 524 - protein, 171 aa, Populus trichocarpa
MGSEQNEGTSFPSSQPQLCANGCGFFGTAANMNLCSKCYRDLRAEEEQAAFAKAAMEKTLNMKSQQHIDSRVAVDAPQVAVANSMQSAEASSSAETAVAAGDQVSSKPANRCFSCNKKVGLTGFMCKCGGTYCGTHRYSENHECSFDFKGAGRNAIAKANPVIKADKVGRF

SEQ ID NO: 525 - DNA, 1080 bp, Populus trichocarpa
atggtagggatcggctcggtccaattgacaaaagtacctccagctaaatacataaatgcccctctcacatttaatttctcaagccagcagttctttataaattgcacattacttttggttgataagaattccacgcataatatacgaacggtggtctctgtatctctagagattcatcggattgagtacaagaaaaagtttgaaaaacctaaccttgatttttttttggactctagaaacaagaaggaaaacatgggttctgagcaaaacgaaggtacaagctttccatcgtcacagccacagctttgtgctaatggatgtggtttttttggcacggctgcaaacatgaacctttgctccaagtgttaccgtgaccttcgtgctgaagaagagcaagctgcctttgctaaggctgctatggaaaagacgctaaacatgaagtcacaacaacatattgactctagggttgctgttgatgcccctcaagttgcggtggctaattccatgcaatccgctgaagcctcttcttcggcagaaactgctgttgctgctggcgatcaggtgtcatcgaagccggcaaataggtgcttcagctgcaataagaaggttggcttgacaggattcatgtgcaaatgcggtggcacatactgtgggactcataggtactctgagaatcacgagtgctccttcgatttcaagggtgctggccgtaatgctattgccaaggcgaatcctgtgattaaggctgataaggtggggagaagcgaagcaattagcaggaccctagattatgacagaagcacctggtattacggccaccgcttgaccctggcttgtcgaattgaaacgccatccgatttaagatttagttgtaagatgctgtacgcttacagcgagggtgttgcctgttgggggctcgaattgctttctagttttgatagtttctggagttttctcaaactgaaatcacgtcgaagagttacagcaaggaaattgaatcaatatacaacaaagctacaatggaaccgcgtcccatgtgaagaaataacttgtcaagctcggtcgaagcagggacattga

SEQ ID NO: 526 - protein, 359 aa, Populus trichocarpa
MVGIGSVQLTKVPPAKYINAPLTFNFSSQQFFINCTLLLVDKNSTHNIRTVVSVSLEIHRIEYKKKFEKPNLDFFLDSRNKKENMGSEQNEGTSFPSSQPQLCANGCGFFGTAANMNLCSKCYRDLRAEEEQAAFAKAAMEKTLNMKSQQHIDSRVAVDAPQVAVANSMQSAEASSSAETAVAAGDQVSSKPANRCFSCNKKVGLTGFMCKCGGTYCGTHRYSENHECSFDFKGAGRNAIAKANPVIKADKVGRSEAISRTLDYDRSTWYYGHRLTLACRIETPSDLRFSCKMLYAYSEGVACWGLELLSSFDSFWSFLKLKSRRRVTARKLNQYTTKLQWNRVPCEEITCQARSKQGH

SEQ ID NO: 527 - DNA, 546 bp, Populus trichocarpa
atggctcaaagaacagagaaagaagagaccgagtgcaaggtaccagaaaacttgactttatgtatcaataattgtggagttacaggtaatccagcaacaaacaacatgtgtcagaaatgtttcaacgctagcaccagcacatctaatccctcctcctccaccaccaccaccaccaccaccataacatttgcagcaacaaccaacggtgtgtctaccaacgagatcttaaaattcaccagcgagaaatcgttgagatccagcatatctcgctcgccggcgaaggatcatcaaaggcaaccaaaaactgcgtcggataaagaaagatctgacagttcttccgtggcgaagaaagaggtgaacaggtgctcagggtgccgacgaagggtagggttgaccggattccgatgtcgttgcggggagcttttttgctgggagcaccggtactcagatcgacatgattgtagttacgattacaaaactgtaggtcgcgaagctatcgcgagagagaatcctgttgtgaaagctgcaaagattgttagagtttga

SEQ ID NO: 528 - protein, 181 aa, Populus trichocarpa
MAQRTEKEETECKVPENLTLCINNCGVTGNPATNNMCQKCFNASTSTSNPSSSTTTTTTTITFAATTNGVSTNEILKFTSEKSLRSSISRSPAKDHQRQPKTASDKERSDSSSVAKKEVNRCSGCRRRVGLTGFRCRCGELFCWEHRYSDRHDCSYDYKTVGREAIARENPVVKAAKIVRV

SEQ ID NO: 529 - DNA, 540 bp, Populus trichocarpa
atggctcaaagagcagagaaagaagagaccgagttcaaggtaccagaaaccttgacttcatgtatcaataattgtggagttacgggtaatcctgcaactaacaacatgtgtcagaaatgtttcaacgctagcaccagcacgtctaattcttcttcctcttccaccgccactagcatgacgtttgcagcaacagccaccagcgtatctaacaacgagatcttaaaattcaccggcgagaagtcggcgagatccagcatatctcgttcgctggtgaaagatccacaaaagtcgcctgaaacagcatcggataaagaaagatcctgtgcctatcatgtggcgaagaaagaggtgaacaggtgctcagggtgccgaagaagagtgggattgactggattccggtgtcggtgtggggagctgttttgctgggagcatcggtactcagatcgacatgattgtagctacgattacaaaactgcaggtcgcgaagctatcgcgagagagaatcctgttgttaaagctgccaagattgttagagtctga

SEQ ID NO: 530 - protein, 179 aa, Populus trichocarpa
MAQRAEKEETEFKVPETLTSCINNCGVTGNPATNNMCQKCFNASTSTSNSSSSSTATSMTFAATATSVSNNEILKFTGEKSARSSISRSLVKDPQKSPETASDKERSCAYHVAKKEVNRCSGCRRRVGLTGFRCRCGELFCWEHRYSDRHDCSYDYKTAGREAIARENPVVKAAKIVRV

SEQ ID NO: 531 - DNA, 462 bp, Populus trichocarpa
atggattcacaaagcaatttgactcctcctttgtgtgctaaggattgtgggttctttggctctccagagaagaagaatttgtgttcagagtgttacagagactatgtcgaagaagaagagtccgttgctgccgagactgccaagaaactctctcaacttgtgatcaataccccatctgctgctaatgataagagcccagctgttttaactgatgaaacaacttcaagttcagccgccgccgccgccgcatcctcttcaacagtaaagattaatagatgcgaatgctgcaacaagaaagttggattgctggggttcaagtgccgctgtgagaagaccttctgtggggttcatcgacatgccacggagcactcttgcacctttgatttcaagactcttggtcgacatattttggccgagcaaaacccacttgttgtttctgataagcttcatactagaatctga

SEQ ID NO: 532 - protein, 153 aa, Populus trichocarpa
MDSQSNLTPPLCAKDCGFFGSPEKKNLCSECYRDYVEEEESVAAETAKKLSQLVINTPSAANDKSPAVLTDETTSSSAAAAAASSSTVKINRCECCNKKVGLLGFKCRCEKTFCGVHRHATEHSCTFDFKTLGRHILAEQNPLVVSDKLHTRI

SEQ ID NO: 533 - DNA, 444 bp, Populus trichocarpa
atggattcacaagacaagttgactcctgcgttgtgtgccaagggctgtggcttctttggctctccagagaacaaaaatctttgttcaaagtgttacaaagactatctcaaagaagaggtaattgctaagactgcagacaaactctctgaacttgtcatcaccccatcatctgatgataagaacccagctgttgtttctaatgaaacagcttcaacaaccactgctactgcatccgctacaacagtgctgaaaaatagatgtgaatgctgcggcaagaaagttggtttgatggggttcaagtgccgctgtgggaaaaccttctgtggggttcatcgatatgccaaggagcactcctgcacctttgatttcaagacttttgatcgacaaattttggctaagcaaaacccgcttgttgctggtgataaacttgatgctagaatctga

SEQ ID NO: 534 - protein, 147 aa, Populus trichocarpa
MDSQDKLTPALCAKGCGFFGSPENKNLCSKCYKDYLKEEVIAKTADKLSELVITPSSDDKNPAVVSNETASTTTATASATTVLKNRCECCGKKVGLMGFKCRCGKTFCGVHRYAKEHSCTFDFKTFDRQILAKQNPLVAGDKLDARI

SEQ ID NO: 535 - protein, 170 aa, Arabidopsis thaliana
MAEEHRCQTPESNRLCVNNCGFLGSSATMNLCSNCYGDLCLKQQQQSSSIKSTVESSLSVSPPSSSSSEISSPIIPPLLKNPSVKLEVPEKKAVISLPTTEQNQQQRPNRCTTCRKRVGLTGFKCRCGTMFCGVHRYPEIHGCSYDFKSAGREEIAKANPLVKAAKLQKI

SEQ ID NO: 536 - DNA, 896 bp, Arabidopsis thaliana
  misc_feature (27)..(27): m is a or c
  misc_feature (33)..(33): m is a or c
  misc_feature (222)..(222): s is g or c
atcgatcactgaatcttcttcttcttmttcttmttcttcttccttctctcaagaacagattttttttaaacgagcttgatcaataaattctctcaagatctatggcggaagagcatcgatgtcagacaccagaaagcaaccgtctctgtgttaacaactgtggcttcctcggcagctccgccaccatgaatctctgttctaattgttacggcgatctttgtstcaaacaacaacaacaatcctcctccatcaaatccaccgttgaatcttccctctctttatctcctccgtcgtcatcatcatcggagatctcttctccgatcatccctcctctccttaaaaatccatcagtcaagctagaggtaccggagaaaaaggcggtgatttcgctgccgacgacggagcagaatcagcaacagaggccgaatcggtgcacgacgtgtaggaaacgggtcgggttaaccggattcaagtgccggtgcggtacgatgttttgcggggttcataggtacccggagatccatggatgcagctacgatttcaaatcggccggacgtgaagagatcgcgaaagcgaatccgttggtgaaagcagcgaagcttcagaagatatgatcagagccgttcgatgcgttgacttttcctctcgtaatcttcatttctacgcgtatgtgtgtcctccgtcccccgagaaatacggatggtgtcgatttgattgatctcagccgttggatcaaaaatggtttattattgtaaaagattgattatgtattaatcaaagggacacgtgtcacgtggttttaggatggagacgctttcgctttctctccttcattttattttctttttcctttcagaaagaaataagattattcgcgttggctttttctttttatc

SEQ ID NO: 537 - protein, 170 aa, Arabidopsis thaliana
  misc_feature (41)..(41): Xaa can be any naturally occurring amino acid
MAEEHRCQTPESNRLCVNNCGFLGSSATMNLCSNCYGDLCXKQQQQSSSIKSTVESSLSLSPPSSSSSEISSPIIPPLLKNPSVKLEVPEKKAVISLPTTEQNQQQRPNRCTTCRKRVGLTGFKCRCGTMFCGVHRYPEIHGCSYDFKSAGREEIAKANPLVKAAKLQKI

SEQ ID NO: 538 - DNA, 1032 bp, Arabidopsis thaliana
ctttttttctcttcccaaattctctcatcgatcactgaatcgttcttcttcttcttcttcttcttcttcttcttcttcttcttccttctctcaagaacagattttttttaaacgagcttgatcaataaattctctcaagatctatggcggaagagcatcgatgtcagacaccagaaagcaaccgtctctgtgttaacaactgtggcttcctcggcagctccgccaccatgaatctctgttctaattgttacggcgatctttgtctcaaacaacaacaacaatcctcctccatcaaatccaccgttgaatcttccctctctgtatctcctccgtcgtcatcatcatcggagatctcttctccgatcatccctcctctccttaaaaatccatcagtcaagctagaggtaccggagaaaaaggcggtgatttcgctgccgacgacggagcagaatcagcaacagaggccgaatcggtgcacgacgtgtaggaaacgggtcgggttaaccggattcaagtgccggttcggtacgatgttttgcggggttcataggtacccggagatccatggatgcagctacgatttcaaatcggccggacgtgaagagatcgcgaaagcgaatccgttggtgaaagcagcgaagcttcagaagatatgatcagagccgttcgatgcgttgacttttcctctcgtaagtcttcatttctacgcgtatgtgtgtcctccgtcccccgagaaatacggatggtgtcgatttgattgatctcagccgttggatcaaaaatggtttattattgtaaaagattgattatgtatttatcaaagggacacgtgtcacgtggttttaggatggagacgctttcgctttctctccttcattttattttctttttcctttcagaaagaaataagattattcgcgttggctttttctttttattaaattccggcttattattattattattattgtgtggcttttgcgtttacaaagtctattcagaaaaataaaaaaaatgatattaatttcccac

SEQ ID NO: 539 - protein, 170 aa, Arabidopsis thaliana
MAEEHRCQTPESNRLCVNNCGFLGSSATMNLCSNCYGDLCLKQQQQSSSIKSTVESSLSVSPPSSSSSEISSPIIPPLLKNPSVKLEVPEKKAVISLPTTEQNQQQRPNRCTTCRKRVGLTGFKCRFGTMFCGVHRYPEIHGCSYDFKSAGREEIAKANPLVKAAKLQKI

SEQ ID NO: 540 - protein, 169 aa, Arabidopsis thaliana
MAEEHRCQTPESNRLCVNNCGFLGSATMNLCSNCYGDLCLKQQQQSSSIKSTVESSLSVSPPSSSSSEISSPIIPPLLKNPSVKLEVPEKKAVISLPTTEQNQQQRPNRCTTCRKRVGLTGFKCRCGTMFCGVHRYPEIHGCSYDFKSAGREEIAKANPLVKAAKLQKI

SEQ ID NO: 541 - DNA, 834 bp, Arabidopsis thaliana
aataaaaatacagattctctcttcttagaaccatcaccgattcgaacagatctaataaatcgtttttttcaccagatttttttcgccggagtttgttttgatccattctgttatggcggaagaacacagacttcaagaaccacgattatgtgctaacaattgtggcttcttcggaagcacagctacacaaaatctctgttccaaatgttttcgagatcttcaacatcaagaacaaaactcttccaccgccaaacatgctcttacccaatccttagccgccgttggcgctgctgcgtcttcctccgtgtcgccaccgcctccgcctccagctgattcgaaagaaatcgttgaagcgaaatcagagaaacgagcggcggctgaaccggaggaggcggatggtccgccgcaagatccgaagcggtgtttgacttgtcggcggcgcgtgggaatcacggggtttcggtgtaggtgtggtttcgttttctgcgggacgcataggtacgcggagcaacatgaatgttcgtttgatttcaagcggatggggaaggataagatcgctaaagcgaatccgattgtgaaagctgataagcttgagaagatttgactttgttgtttgttgtttgttgttgttgctttggttttgtgcgtttgaatgaaacacacatgaagaagaaagagcaagaaacaaacatgtcaatgtaaatttaagctttatttgatgatttcttcagtttggttattaaatttgcttattattgatttgattgttccgtttgatgatcttgtagaaggcttaagtcgtattatcaatgtgtagaatttggatttggttgg

SEQ ID NO: 542 - protein, 163 aa, Arabidopsis thaliana
MAEEHRLQEPRLCANNCGFFGSTATQNLCSKCFRDLQHQEQNSSTAKHALTQSLAAVGAAASSSVSPPPPPPADSKEIVEAKSEKRAAAEPEEADGPPQDPKRCLTCRRRVGITGFRCRCGFVFCGTHRYAEQHECSFDFKRMGKDKIAKANPIVKADKLEKI

SEQ ID NO: 543 - DNA, 859 bp, Arabidopsis thaliana
acgtgtttctgtttttctctaatttttctcttgttgttctcgattaacgaaaaagacttgtcgttctcaattcttatcgatttaagaacaaatcatctaacgaagattacttccgaagatcagaaacaaacacaaactgtgaatcgttgtttgttaattctctttaaaatcgccagaagaaagagatctccgttttctacagaagaaaagcaagagagtaagaatgggatcggaacaaaacgatagcacaagcttcacgcaatcgcaagcttcagagccaaagctatgtgttaaaggatgtggtttctttggatcaccatcaaacatggatctctgttctaaatgttacagaggcatttgtgctgaggaagctcaaacagcagttgctaaagctgctgttgaaaaatctttcaagccttctcctcctcgtagtctcttcatagcagaacctcctgctgttgttgtggaacccaaacccgaaaaggcggcagttgttgttgtctcggccgagccatcttcctcggcggttcctgaggcgaacgagccatcgagacctgcacgaaccaaccggtgtttgtgttgtaacaagaaggttgggatcatggggtttaagtgcaaatgcgggagcactatctgcggcgatcatcggtacccggagactcatgattgcagctttgatttcaaagaagttggacgtggagagattgccaaagctaatcctgtggttaaggctgataaaattcaaaggttctgaaatatggaagttttttctaagtattttggtggtaattactcatttgtatttgaaccgatttgggggttgtcttggatggttttaatggattgtttccaaagggac

SEQ ID NO: 544 - protein, 176 aa, Arabidopsis thaliana
MGSEQNDSTSFTQSQASEPKLCVKGCGFFGSPSNMDLCSKCYRGICAEEAQTAVAKAAVEKSFKPSPPRSLFIAEPPAVVVEPKPEKAAVVVVSAEPSSSAVPEANEPSRPARTNRCLCCNKKVGIMGFKCKCGSTICGDHRYPETHDCSFDFKEVGRGEIAKANPVVKADKIQRF

SEQ ID NO: 545 - protein, 168 aa, Arabidopsis thaliana
MGSEQNDSTSFSPSEPKLCVKGCGFFGSPSNMNLCSKCYRDIRATEEQTASAKAAVEKSLNPNKPKTQPQQSQEITQGVLGSGSSSSSTRGGDSAAAPLDPPKSTATRCLSCNKKVGVTGFKCRCGSTFCGTHRYPESHECQFDFKGVAREAIAKANPVVKADKVDRI

SEQ ID NO: 546 - DNA, 666 bp, Brassica napus
atttcatttctgtttggttgctgagaaaacggaggaaaattttctgaatttttctttctcggtgaccagattccggttcgtgttttgttcttcttttctaaactctgtagatttattaccgtctttttatttgttttcagatatttttgacgagctttattgatttaagttcttgaattacaatcaagatccatggcggaagagcatcgatgtcaaacgccggaaggccaccgtctctgtgctaacaactgcggcttcctcggcagctccgcgaccatgaatctatgctccaactgctacggcgatctctgtcttaaacaacagcaacaaggctcatcctctctctccgccgtatctcctccgccgccggtgatcacttccatctctactccgatgatccagcctctcgttcaaaacccatctgctgaattggaggtaccggcgaagaacgtgtcggtgacggtaacggcgacggagcagccgcagaaacggccgaaccggtgtaccacgtgcaggaaacgggtcgggttgaccgggttcaagtgccggtgtgggacgactttttgtggggcccacaggtatccggaggtccatggatgcaccttcgatttcaaatcggccggtcgcgaagagatcgcgaaggcgaacccgttggtcaaagcggcg

SEQ ID NO: 547 - protein, 158 aa, Brassica napus
MAEEHRCQTPEGHRLCANNCGFLGSSATMNLCSNCYGDLCLKQQQQGSSSLSAVSPPPPVITSISTPMIQPLVQNPSAELEVPAKNVSVTVTATEQPQKRPNRCTTCRKRVGLTGFKCRCGTTFCGAHRYPEVHGCTFDFKSAGREEIAKANPLVKAA

SEQ ID NO: 548 - DNA, 961 bp, Brassica napus
gtacaaatattcgatttttcagcagcgtcgtctctgtttccatcttctttctctttcttctcccttcccgatttcatcgttaattggtaaagaaaaaaagtcagtgaatcatctctcttcttcttcttcttctctcaagaacaggttttcggtttaaagcctcgaaattctctatggcggaagagcatcgatgtcagacgccggaaggccaccgtctctgtgctaacaactgcggcttcctcggcagctccgccaccatgaatctatgctccaactgctacggcgatctctgccttaagcaacagcaagcttccatgaaatccaccgtcgaatcctctctctccgccgtatctcctccgtcgtcagagatcggttctatgcaatccaccgttgaatcctctctctccgacgtatctcctccatcatcggagaccatttccatctcttctccaatgatccagcctctcgttcgaaacccatcagctgaactggaggtaacggcgaagaacgttccgaagacggtgactccgccgccggagcagcagcagaaacggccgaatcggtgcacgacgtgtaggaaacgggtcgggttgactgggttcaagtgccggtgcggaacgactttttgcggggctcacaggtacccggaggtccatggatgcmccttcgatttcaaatcggccggtcgcgaagagatcgccaaggcgaacccactcgtcaaagcggcgaagcttcagaagatttgatcgccgccgttcgatgcgttgacttttaaaccatcatttgaacgcgtttgtctcccccagaaatggtgttagattgatctcagccgttcatgatgtgtcattatgtaaaagatatgtactacgaaggacacgtgtcacgtgacgttttcctcatcttcccaattaattttcttttccccttaaagaaataagattattcgcgttggcttttctct

SEQ ID NO: 549 - protein, 190 aa, Brassica napus
  misc_feature (164)..(164): Xaa can be any naturally occurring amino acid
MAEEHRCQTPEGHRLCANNCGFLGSSATMNLCSNCYGDLCLKQQQASMKSTVESSLSAVSPPSSEIGSMQSTVESSLSDVSPPSSETISISSPMIQPLVRNPSAELEVTAKNVPKTVTPPPEQQQKRPNRCTTCRKRVGLTGFKCRCGTTFCGAHRYPEVHGCXFDFKSAGREEIAKANPLVKAAKLQKI

SEQ ID NO: 550 - DNA, 932 bp, Brassica napus
ttccttttctcataccccttctttcatcatcttcttccctttctctctcaacattcccattccttccctattccatcgatcttctctacgcttttatatacataactcattatccatccacccttattccctcatctctcaacgttctattttcttctcgaatatcacagaacccgattagatctatagatcttgtttctccagattaggacatcatgtcggaagaacacaggcttcaggagccacggttatgcgctaacgattgcggtttcttcggaaacaccgccacgcagaatctctgctctaaatgttttagagatctaaagcacgaacaggagaactcctccaccgccaaaaacgcccttaagcagactctcgccgcctgtgttgcgtcctcctcsgtatcctcaccgcctcctcctcctcctccagccgatctgacttcagatctgaaagaagtcaacacagagaatccggggaaacgggcagcgagcgagcccgaggaggaggaggagcagaagccgccgcaagatcctaaacgctgtttgacttgccggcggcgcgtggggatcacaggcttcaggtgcaggtgtgggttcgtgttttgtggaacccataggtacgccgagcagcacgagtgcactttcgatttcaagcgggtcgggaaggagaagatcgctaaggcgaatccgattgtgaaagcggagaagctcgagaagatytgaaagaattgtgtttggtgtaaatttatcatcatcaattttaagctttaatttgatttcttctcggtttggttataaaatgatgtgttytcttattagttttcgataattgtttttacaaccattgtttgattgttcagtttagttatcagctatgatattagggaacaatcaaagccattctctcaacgtagctgtgaattttttgct

SEQ ID NO: 551 - protein, 169 aa, Brassica napus
  misc_feature (62)..(62): Xaa can be any naturally occurring amino acid
  misc_feature (169)..(169): Xaa can be any naturally occurring amino acid
MSEEHRLQEPRLCANDCGFFGNTATQNLCSKCFRDLKHEQENSSTAKNALKQTLAACVASSXVSSPPPPPPPADLTSDLKEVNTENPGKRAASEPEEEEEQKPPQDPKRCLTCRRRVGITGFRCRCGFVFCGTHRYAEQHECTFDFKRVGKEKIAKANPIVKAEKLEKX

SEQ ID NO: 552 - DNA, 951 bp, Brassica napus
  misc_feature (595)..(595): s is g or c
  misc_feature (598)..(598): s is g or c
  misc_feature (639)..(639): r is g or a
  misc_feature (682)..(682): y is t/u or c
  misc_feature (696)..(696): y is t/u or c
  misc_feature (761)..(761): m is a or c
  misc_feature (766)..(766): y is t/u or c
  misc_feature (791)..(791): r is g or a
  misc_feature (793)..(793): r is g or a
gaaactcagaaaagcagagaactttattctctcctctaacctctcaacttctgctggatctctccagcagacggaagatcttcttcggagagattcttaggggaccgaacgatctatcgatcaaggcttctcgggcaaacagaagtgcagaaatggaccacgacaagacaggatgccaaagcccacccgagggtcccaagctatgcatcaacaactgcggtttcttcggaagcgctgccacaatgaacatgtgttccaagtgccacaagactatcttgtttcaacaggaacagggggccaagcttgcatctgcagtgtctggatcacccagcaacatcctaaaggaaaccttcactgctgatttggttgatgctggaaccaaatccatcgagcctgtggctgtctctgtacaagctgttgcagaggtagtagcaccagaagaagctgcagcaaaaccaaaggaagggcccagccgatgtactacttgcaacaaacgggttggtttgactggattcaaatgtcgatgtggtgacctcttctgtggtacgcaccgctatgcagacgttcataactgctctttcgattaccatgttgstgsgcaagaagctatagccaaagcgaacccggttgtgaaggcarataagcttgacaagatttgaaactcagaaactatgtttccttyttcatgtccgtgtytggttcaagcgtgtgttgatctttagcttcttccgttctctctgccagtatctgtggtgtgaaamctttytatattatcttgtgtttgcaagcararaagtgtgctcttaaatatatatatatgctttgatgtgtttctctttttttttttttaatattatttatgagcactatggtttggttatgtttactcctttgggtctgtatcatattgagattgtaactttagctatatgaagatttttcttaaaagct

SEQ ID NO: 553 - protein, 165 aa, Brassica napus
MDHDKTGCQSPPEGPKLCINNCGFFGSAATMNMCSKCHKTILFQQEQGAKLASAVSGSPSNILKETFTADLVDAGTKSIEPVAVSVQAVAEVVAPEEAAAKPKEGPSRCTTCNKRVGLTGFKCRCGDLFCGTHRYADVHNCSFDYHVQEAIAKANPVVKAKLDKI

SEQ ID NO: 554 - DNA, 852 bp, Brassica napus
  misc_feature (379)..(379): y is t/u or c
  misc_feature (617)..(617): r is g or a
  misc_feature (632)..(632): y is t/u or c
  misc_feature (805)..(805): y is t/u or c
  misc_feature (814)..(814): r is g or a
  misc_feature (831)..(831): y is t/u or c
  misc_feature (846)..(846): y is t/u or c
  misc_feature (850)..(850): s is g or c
atcgaagagagaaaagccgaaacctttttttctctcgtctccaattttctcagcttctgctggatctctccagcatccttcctcggagagattcgtatgaaatggaccacgacaaaacaggatgccaaagcccacctgaaggtcccaagctatgcatcaacaactgcggtttcttcggaagcgctgccacaatgaacatgtgttccaagtgtcacaaggctatcctgtttcaacaggaacagggggctaagtttgcatctgcagtgtctggtggtacatcatcatccagcaacatcttaaaggaaacctttgctgctaccgcgctggttgatgctgaaaccaaatccgttgagccggtggctgtctctgtacagccatyttctgtccaagttgccgcagaggtagtagctccagaagccgctgcagcaaaactaaaggaaggaccaagccgatgtgctacttgcaataaacgggttggtctgactggattcaaatgtcgctgtggtgacctcttctgcgggacgcaccgttatgcagacatacacaactgctccttcaattaccatgccgctgcgcaagaagctatagctaaagcaaacccggttgtgaaggcagaraagcttgacaaaatytgaaactcaaacaccaaagtgatagactacgacatccttgggaacatttagaattggaaaagaaggtttagaattttacatatttattattattgcctataagagggagacatttgattctaataaaatcatccattaagagatcaaagaaacggggttgtctcctctaaatytaataaacraggagtttgtcagtttyttgaataaatagcayattsat

SEQ ID NO: 555 - protein, 177 aa, Brassica napus
  misc_feature (93)..(93): Xaa can be any naturally occurring amino acid
  misc_feature (172)..(172): Xaa can be any naturally occurring amino acid
  misc_feature (177)..(177): Xaa can be any naturally occurring amino acid
MDHDKTGCQSPPEGPKLCINNCGFFGSAATMNMCSKCHKAILFQQEQGAKFASAVSGGTSSSSNILKETFAATALVDAETKSVEPVAVSVQPXSVQVAAEVVAPEAAAAKLKEGPSRCATCNKRVGLTGFKCRCGDLFCGTHRYADIHNCSFNYHAAAQEAIAKANPVVKAXKLDKX

SEQ ID NO: 556 - DNA, 881 bp, Brassica napus
  misc_feature (653)..(653): m is a or c
  misc_feature (676)..(676): r is g or a
  misc_feature (753)..(753): m is a or c
  misc_feature (843)..(843): y is t/u or c
  misc_feature (870)..(870): y is t/u or c
gttgcgtgtttgtttgtctctctcatctcgctcacctaaattcgcaaaaaatattctgaacaatattgaacagaaaaccaagaaacccactttttatttcttctccgaaagatcagaaatatattttattttgtcaaatttcgttgaagaagctttgaaattaggggaacaaatttcatttgatctgcacgtttctgatttgagaagaaggagaaaggaacaacaatgagctctgagcaaaacaacagcacaagcttcccaccaactgagccaaaactctgcgacaacggatgcggtttcttcgggtcaccttccaacatgaacctctgttccaaatgctacagaagtctccgagccgaggaagatcaaaccgccgtagcaaaagctgctgtcaagaactcacttaagcttccatcttgcagtctcattatcacaccagagcaaaaacagcctcttgaaaccaaaccagcctctgttgttgtaaccgctgagccgtcttcagttcctatagccacgggacaggaggaggcagagccgtcgaaacctgcgcggacgaacaggtgtttcagctgtaacaagaaggttggagttatggggtttaagtgcaaatgcggtagcacgttttgcgggagccataggtacccggagaagcmcgagtgtagcttcgatttcaaaraagttggacgtgatgcaatcgcaaaggccaatcctgtgatcaaggcggataaagtcgaaaggatatgaaaaatatcmaaccttttctttttataaagtaatttgtggtttctattttcaacttctttggatgtcgatgtgatgtgatcatgttggatgttgggtttytatgaatcataatgaaaattgctgctyttggttttatc

SEQ ID NO: 557 - protein, 172 aa, Brassica napus
  misc_feature (143)..(143): Xaa can be any naturally occurring amino acid
  misc_feature (151)..(151): Xaa can be any naturally occurring amino acid
MSSEQNNSTSFPPTEPKLCDNGCGFFGSPSNMNLCSKCYRSLRAEEDQTAVAKAAVKNSLKLPSCSLIITPEQKQPLETKPASVVVTAEPSSVPIATGQEEAEPSKPARTNRCFSCNKKVGVMGFKCKCGSTFCGSHRYPEKXECSFDFKXVGRDAIAKANPVIKADKVERI

SEQ ID NO: 558 - protein, 175 aa, Brassica napus
MSSEQNNSTSFPPTEPKLCDNGCGFFGSPSNMNLCSKCYRSLRAEEDQTAVAKAAVEKSLKLPSCSLITAPAPKQPLETKPASVETVVIAETSSVPPVATGQDEGEPSKPARPNRCFSCNKKVGVMGFKCKCGSTFCGSHRYPEKHECSFDFKEVGRGAIAKANPVVKADKVQRI

SEQ ID NO: 559 - DNA, 920 bp, Glycine max
attctccgttaagattctttcttctttcctctttccactcttggtcttatcttcttcacaatcccacaaccactccttgttataaatcagatccaaacatggccgaagaacaccgatgccaagctcccgaaggtcacagactctgctccaacaactgcggcttcttcggtagccccgccacaatgaatctctgttccaaatgctacagagacatccgtttgaaggaagaagaacaagccaaaactaaatccacaatcgaaaccgctctttctggatcttcctccgccaccgtcgccgttgcctccgccgtggattctcttccggcgccggttgaatccctccctcaaccgtcggtggtgagttcgccagatgtggccgcaccggttcaggcgaaccggtgcggcgcgtgtaggaagcgcgtgggattgactgggtttaagtgcaggtgcggaaccacgttttgtgggactcaccggtaccccgagaaacacgcgtgtggcttcgatttcaaggcggtggggagagaggagatagcacgggcgaatcccgtgatcaaaggcgagaagctacggaggatttaatctgcaccgttgatatgatgatcgaagcgattagggtgagttgatcaggaccgtccgtcgtgggccgttgatacgaacctatttcgagcgtgtgtaagaaaaaaaaaatctattagttatgacgacattgggaagggttgaataagtcatattttggaggctttgctttgtgtttgttcattaaaaatggaaaatgttaggtccacccacgttcggaaattgaggggtttgtttagaattgcaatgcaatgtaaaaaagtgtagtttaatatttttctacaggcatttctatttttcttccgtttgcgagaaaggtaaattatcgtctgcgttgtattc

SEQ ID NO: 560 - protein, 160 aa, Glycine max
MAEEHRCQAPEGHRLCSNNCGFFGSPATMNLCSKCYRDIRLKEEEQAKTKSTIETALSGSSSATVAVASAVDSLPAPVESLPQPSVVSSPDVAAPVQANRCGACRKRVGLTGFKCRCGTTFCGTHRYPEKHACGFDFKAVGREEIARANPVIKGEKLRRI

SEQ ID NO: 561 - DNA, 1292 bp, Glycine max
aacctgtatttttcgttttctcaatttccgcttattttcgttccagccagagccagcttttccattttcccctttaaattttctccgaatccaaacggaaccgtaatcgtttcttattccttttttgtttgtttgtttctttctctctccccgccaggttcagagacttttccgattcctggaagaagagaagagaaaacctaaatcacagatccatggcggaagaacaccgatgtgaacctcccgaaggtcaccgactctgcgtcaacaactgcggcttcttcggtagcaccgccacgatgaacctctgctccaaatgctacagcgcgatccgtttgaaggagcaagaagaagcgtcgacgaaatccacaatcgaaaccgcgctctcttctgcctcctcggcgaaaccgtcgtcgtccacgtcacctccgccgtcggcggtcgatgtgctcatggaatctccaccgccgtctgcggcggaggttgaggttgctgtcacggtcacggtcgcggtggcgtcgagttctatttccataaactcaggttcggttgcgcaaccgaaccggtgtgccacgtgtcggaagcgcgtggggctgaccgggttcaagtgcaggtgcggagtgacgttctgcggggcccacaggtacccggaggagcacgcgtgcgggttcgatttcaagacagtgggaagagaggagattgcacgtgccaaccccgtgatcaaagcggagaagctgcggaggatttgatgatttcaatctgggccgttcgatgggaccggagcttggtgatttaatctccaccgtcctcgtgtatgcgagagaaagaaaaagagagagtgagagggaaaatgcggttattatgtaacattatgattatgatgatctgtgttttaattaagacgaaagcttgaaaagtcggtttgtctggtctagaagggatgatgaaatgaacgagtcatatttatttggctttggtccactgtcgggggtggttgaaagttgaaatgatttgtgataagagtctcagggcaacgatgcagtacggtggagcgttttattgtaatgaatgtgaaagtgaaattattctactccaagatattttttgtttttttttatcctgcttgaatgatttatatgcctagtatgctctatgacagaggagaagggagtgcgttatgtttccaccaccgacggtgatgaatcaattgttttcaattgcgagagtggggtttccaaacccgtatttcctcaatgttgattatattaattttaattaggtttttctgattc

SEQ ID NO: 562 - protein, 177 aa, Glycine max
MAEEHRCEPPEGHRLCVNNCGFFGSTATMNLCSKCYSAIRLKEQEEASTKSTIETALSSASSAKPSSSTSPPPSAVDVLMESPPPSAAEVEVAVTVTVAVASSSISINSGSVAQPNRCATCRKRVGLTGFKCRCGVTFCGAHRYPEEHACGFDFKTVGREEIARANPVIKAEKLRRI

SEQ ID NO: 563 - DNA, 582 bp, Glycine max
aaaatgccgcagcagcgcgctgtttggtaccaacacaaaatctaacccgcattttctctgtcatccaaacaacccctttcgcctcagatctctcgccgcgagaacatggatcaattgtcggcgatcagcgaggacctggccgagatcgacggacacatcgccgacaatttccgcgccctatcaaatggatttcagaagttggagaagattaaggattcgaatagacagagcaggcagttggaagacctcacggaaaaattgcgagaatgtaaacggtaattttcacctgtcacattgatgcaaactatgtgcaagagagccgaagattgttcattttgttggctgcaaggttttaaacatcggtcgcggtcacgttgccattttgtcgtgtttgttgatatcccgacaaatgcagccgatgcggtcccaattgcagtcacggacagttgaaaaaccttgatgttgcatcccaaacggttgcgggctgtttgttaaaaccttaacgcttgttatcattttcagatctgttttgaaaatttgtaatcagaaacttgtgtatagagtgccattttgatctgkgtt

SEQ ID NO: 564 - protein, 158 aa, Glycine max
MAEEHRCQAPRFCANNCGFFGSPATQNMCSKCYRDFQLKEQQSSNAKMVLNQSLVPSPPPAVISQPSSSSSAAVDPSSAVVDDAPRESEEVKAPQQNRCMTCRRRVGLTGFKCRCGMMLCGTHRYPEQHACEFDFKGMGREQIAKANPVVKGEKLDKI

SEQ ID NO: 565 - DNA, 700 bp, Glycine max
  misc_feature (590)..(590): n is a, c, g, or t
accatcgttcttattatcccctcttccctcttctcattccaaacctcaacaaggttcagatacttttccgattccgtcgcgaatttccgattcatcgaagaagaagagaaaacctaaatcgcagatccgaacgcagtaaaaaaaccatggcggaagaacaccgatgcgaaactcccgaaggtcacctactctgcgccaacaactgcggcttctccggtagcaccgccacgatgaacctctgctcgaaatgctacggcgcgatccgcttgaaggagcaagaagaagcgtcgacgaaatctacaatcgaaaccgcgctctcttcttcctcgttgaaaccgtcgttctccacgtcacctccaacgttggtggatgtcctcatcgaatcgccgccgccgtctttggcggaggttgcggtcacggtggcggtggaggcgtcgagttctatttccacaagctcaggttcggttgcgcaaccgaaccggtgtgccacgtgtcggaagcgcgtggggctgaccgggttcaagtgcaggtgcggattgacgttctgcggggcccacaggtactcggagaagcacgcgtgcgggttcgantttaagacggtggggaagagaggagattgcacgtgccaaccccgtgatcaaagcggagaagctgcggaggatttgatgattcgttctcggccgttcgatgggacccggat

SEQ ID NO: 566 - protein, 184 aa, Glycine max
  misc_feature (148)..(148): Xaa can be any naturally occurring amino acid
MAEEHRCETPEGHLLCANNCGFSGSTATMNLCSKCYGAIRLKEQEEASTKSTIETALSSSSLKPSFSTSPPTLVDVLIESPPPSLAEVAVTVAVEASSSISTSSGSVAQPNRCATCRKRVGLTGFKCRCGLTFCGAHRYSEKHACGFXFKTVGKRGDCTCQPRDQSGEAAEDLMIRSRPFDGTR

SEQ ID NO: 567 - DNA, 776 bp, Brassica napus
attccatcgatcttctctacgcttttatatacataactcattatccatccacccttattccctcatctctcaacgttctattttcttctcgaatatcacagaacccgattagatctatagatcttgtttctccagattaggacatcatgtcggaagaacacaggcttcaggagccacggttatgcgctaacgattgcggtttcttcggaaacaccgccacgcagaatctctgctctaaatgttttagagatctaaagcacgaacaggagaactcctccaccgccaaaaacgcccttaagcagactctcgccgcctgtgttgcgtcctcctccgtatcctcaccgcctcctcctcctcctccagccgatctgacttcagatctgaaagaagtcaacacagagaatccggggaaacgggcagcgagcgagcccgaggaggaggaggagcagaagccgccgcaagatcctaaacgctgtttgacttgccggcggcgcgtggggatcacaggcttcaggtgcaggtgtgggttcgtgttttgtggaacccataggtacgccgagcagcacgagtgcactttcgatttcaagcgggtcgggaaggagaagatcgctaaggcgaatccgattgtgaaagcggagaagctcgagaagatctgaaagaattgtgtttggtgtaaatttatcatcatcaattttaagctttaatttgatttcttctcggtttggttataaaatgatgtgttctcttattagttttcgataattgtttttacaacc

SEQ ID NO: 568 - protein, 169 aa, Brassica napus
MSEEHRLQEPRLCANDCGFFGNTATQNLCSKCFRDLKHEQENSSTAKNALKQTLAACVASSSVSSPPPPPPPADLTSDLKEVNTENPGKRAASEPEEEEEQKPPQDPKRCLTCRRRVGITGFRCRCGFVFCGTHRYAEQHECTFDFKRVGKEKIAKANPIVKAEKLEKI

SEQ ID NO: 569 - DNA, 892 bp, Brassica napus
aacctttttttctctcgtctccaattttctcagcttctgctggatctctccagcagagacgatccttcctacgggactgtttgatcaatcaaggcttctcgggcaaacaggtgaatagaagtgagattaggctatgtgggttttgtatgttttacagatttgctattgaaggttcatttctaagaaggaagaaatggaccacgacaagacaggatgccaaagcccacctgaaggtcccaagctatgcatcaacaactgcggtttcttcggaagctctgccacaatgaacatgtgttccaagtgtcacaaggctatcctgtttcaacaggaacagggggctaggtttgcatctgcagtgtctggtggtacatcttcatccagcaacatcttaaaggaaacctttgctgctaccgcgctggttgatgctgaaaccaaatccgttgagccggtggctgtctctttacagccatcttctgtccaagtcgtcgtcgcagaggtagtagctccagaagcagctgcatcaataccaaaggaaggaccaagccgatgtgctacttgcaataaacgggttggtctgactggattcaaatgtcgctgcggtgacctcttctgcgggacgcaccgctatgcagacatacacaactgctccttcaattaccatgccgctgcgcaagaagctatagctaaagcaaacccggttgtgaaggcagagaagcttgacaaaatctgaagaactcaaacaccaaagtgatagactacgacctccttaggagcatttagaattggaaaagaaggtttagaattttacatatttgttattattgcctactaaggtgtttactcctataagagggagacatttgattctaataaaatcatccattaagagacc

SEQ ID NO: 570 - protein, 178 aa, Brassica napus
MDHDKTGCQSPPEGPKLCINNCGFFGSSATMNMCSKCHKAILFQQEQGARFASAVSGGTSSSSNILKETFAATALVDAETKSVEPVAVSLQPSSVQVVVAEVVAPEAAASIPKEGPSRCATCNKRVGLTGFKCRCGDLFCGTHRYADIHNCSFNYHAAAQEAIAKANPVVKAEKLDKI

SEQ ID NO: 571 - DNA, 1010 bp, Glycine max
  misc_feature (937)..(937): y is t/u or c
  misc_feature (943)..(943): y is t/u or c
acgcatccttctttctctctctctcctcctcgatcccaattccactagggattcaattccgatgcgattccgagcttgttagatccacgacaacgtttcgtttcccagattcttttgtaaaaaaaaataatcttcctttgcccaacaggtaagttggaaaaaaatggaccatgacaagactgggtgccaagctcctcctgaaggtcctatattgtgcatcaacaactgtggattttttggaagtgcagctaccatgaatatgtgttctaaatgccacaaagacatgttgctgaaacaggagcaggccaagcttgcagcatcatccattgggaatattatgaatgggtcttcaagcagcactgaaaaggaacctgttgttgccgctgctgctgctaatgttgatatcccagttattccagtagagcctaaaactgtctctgtgcaacctttatttggttcaggtccagaagggagtggtgaggcaaagctgaaggatggaccaaaacgctgcagcagctgcaacaagcgagttggtttgacagggtttaattgtcgatgtggtgaccttttttgtgctgtacatcgctactcagacaagcataattgcccatttgattaccgcactgctgctcgggatgccatagctaaagcaaacccagttgtcaaggctgagaagcttgataagatctaagatttgaagtcaaagtttcatggcctgagatgaagttatgcataatttcatcatgaaatgatccgagtttccttcacattttatttggtgttctgtagttatattgttatatgtggtgggtgacttggagttattggacatttctgcaatttgaaggactctttcatgtgattggcgaaaatatatatgttggccacagtgtttaagtttttaagtgctggtttggtgaaagttggttggtgttgytagctytgtaatgcatctatcctgtatcagaatggtatgtgcaatttaaagatggtttcaagagcatccgggg

SEQ ID NO: 572 - protein, 175 aa, Glycine max
MDHDKTGCQAPPEGPILCINNCGFFGSAATMNMCSKCHKDMLLKQEQAKLAASSIGNIMNGSSSSTEKEPVVAAAAANVDIPVIPVEPKTVSVQPLFGSGPEGSGEAKLKDGPKRCSSCNKRVGLTGFNCRCGDLFCAVHRYSDKHNCPFDYRTAARDAIAKANPVVKAEKLDKI

SEQ ID NO: 573 - DNA, 455 bp, Glycine max
attgattcgttgttcgtgagtctggcccgctaaaaccaaaaggaacaccgggttaaccattcttgatgtagaaaagtgaacggcagctgggaagctaaacgacggcgtggagtgatgatattggaggagatgttcttctgcagcagcagtagcagtagccagcagcttcaaccatttgaaaatccttcttccaatctactccttctctctggccctccttcttcgtatttcctctctctgaaaattgaatatgacatgacttgtttcaattcttaatgatccaattttacgttatacagtgggaagacttctcttcttttccaatttgcattcaatgtagcactgcactccgactcaaataacaaagtcatcttcatttgcaaccgccataggttggattccaaacccccttttctttctcagggtattgacccctcttctcatgtattccaccg

SEQ ID NO: 574 - protein, 174 aa, Glycine max
MDHDKTGCQAPPEGPILCINNCGFFGSAATMNMCSKCHKDILLKQEQAKLAASSIGNIMNGSSSSTEKEPVVAAAANIDIPVIPVEPKTVSVQPLFGSGPEGSVEAKPKDGPKRCSSCNKRVGLTGFNCRCGDLFCAVHRYSDKHNCPFDYRTAAQDAIAKANPVVKAEKLDKI

SEQ ID NO: 575 - DNA, 1197 bp, Glycine max
agaaatcgagagaaagagagagagaattacagagcattttccaacacgattacacgaccgaatcaaacccctctttctctccgaagctgcttttaatatcgtactggccttcgattgttctcctctttaatacatactgttctctcttcgatttgagggaacagtacaagagtctgagcatcggttaacccaactgcacaggttttaaactgccgtcatggtatcatcgtggtgttgcgggaaattgtggacaaatgtgcccgttgtggctgtaaattgtggttgtggagacttcaaaaaccttgatgttgctggccaaaattaaggtagtctccaaataatggagcctcatgatgagactggatgccaggctcctgaacgccccattctttgcattaataattgtggcttctttggaagagcagctaccatgaacatgtgttccaagtgttacaaggacatgctgttgaagcaggagcaggacaaatttgcagcatcatccgttgaaaacattgtgaatggcagttccaatggcaatggaaagcaggctgtggctactggtgctgttgctgtacaagttgaagctgtggaggtcaagattgtctgtgctcagagttctgtggattcgtcctccggtgatagtttggagatgaaagccaagactggtcccagtagatgtgctacatgccggaaacgtgttggtttaactggtttcagctgcaaatgtggcaacctcttctgtgcaatgcatcgctattctgataaacatgattgcccttttgattataggactgttggtcaggatgccatagctaaagccaaccccataattaaggcagataagctcgacaaaatctaggcatgcactactgaaggttaatgtatgaaccttgaagcttcatcttctatatgtaagtttcatatatgttgtcttcctggttttttaggtgtcctttagtgattaaaatgatccaagtcaagatggcaagggcatcattagggaaaacatttattgttggttgggagatccacttgttagctccagtgtgtttgtgctgctttgatggacactttggctcattttgtaatttgatttcctgcttggtctgcatttttcttcctcattgcatgaaaagtatttcctgcgtagtcttgtattggttttgcttttgaatcattataggaatgtttaatttc

SEQ ID NO: 576 - protein, 172 aa, Glycine max
MEPHDETGCQAPERPILCINNCGFFGRAATMNMCSKCYKDMLLKQEQDKFAASSVENIVNGSSNGNGKQAVATGAVAVQVEAVEVKIVCAQSSVDSSSGDSLEMKAKTGPSRCATCRKRVGLTGFSCKCGNLFCAMHRYSDKHDCPFDYRTVGQDAIAKANPIIKADKLDKI

SEQ ID NO: 577 - DNA, 1124 bp, Glycine max
  misc_feature (243)..(243): r is g or a
  misc_feature (348)..(348): k is g or t/u
  misc_feature (362)..(362): k is g or t/u
  misc_feature (597)..(597): r is g or a
  misc_feature (818)..(818): y is t/u or c
gacgcatccttctctttctttcggctttgatttctctctcctcgactcgatcccaattccactagggttagggttccgttacccttttccccttctcaattcttgctttcctcttttaaccgctatcgttttcgtttattcattgatcattctttctcgttttcttctttttcggtgaatccaggattcaattccgatgcgattccgagcttgttagatccacgacaaggtttcgtttcccarattcttttgtaaaaaaaaattcttcctctgcccaacaggtaagttgtaaaaaaatggaccatgacaagactgggtgccaagctcctcctgaaggtcctatattgkgcatcaacaactgkgggttttttggaagtgcagctaccatgaacatgtgttctaaatgccacaaagacatattgctgaaacaggagcaggccaagcttgcagcatcatccattgggaatattatgaatgggtcatcaagcagcactgaaaaggaacctgttgttgctgctgctgctaatattgatatcccagttattccagtagagcctaaaactgtctctgtgcaacctttatttggttcaggtccaraggggagtgttgaggcaaagccgaaggatggaccaaaacgttgcagcagctgcaacaagcgagttggtttgacagggtttaattgtcgatgtggtgaccttttttgtgctgtacatcgctactcagacaagcataattgcccatttgattaccgcactgccgctcaagatgctatagctaaagcaaacccagttgtcaaggctgaaaagcttgataagatytaagatttgaagttgaagttccatgccctgagatgaagttatgcacaatttcatcatgaaatgatccgagtttccttcacattttattggtgttcttattatattgttatatgtggtgggtgacttgagttattggacatctctgcaatttgaaggactctttcatgtgattggtgaaaatatatatgttggccactgttgtttttaagtgctggtttggtgaaagttggttggtgttgttagctttgtaatgcatctattcttgtatcagaatggtatttgcaatttaaagatggtttcaagagc

SEQ ID NO: 578 - protein, 174 aa, Glycine max
  misc_feature (18)..(18): Xaa can be any naturally occurring amino acid
  misc_feature (22)..(22): Xaa can be any naturally occurring amino acid
  misc_feature (101)..(101): Xaa can be any naturally occurring amino acid
  misc_feature (174)..(174): Xaa can be any naturally occurring amino acid
MDHDKTGCQAPPEGPILXINNXGFFGSAATMNMCSKCHKDILLKQEQAKLAASSIGNIMNGSSSSTEKEPVVAAAANIDIPVIPVEPKTVSVQPLFGSGPXGSVEAKPKDGPKRCSSCNKRVGLTGFNCRCGDLFCAVHRYSDKHNCPFDYRTAAQDAIAKANPVVKAEKLDKX

SEQ ID NO: 579 - protein, 170 aa, Medicago truncatula
MAEEHRCQAAQRLCANNCGFFGSPAMQDLCSKCYRDLQMKEQRSSSAKLVLNQTLIPQQSNSSSLDTGIIHPSSTSPSVMIVSSSTPTVELVAAAAGPSEAEPPKVQPNRCGTCRRRVGLTGFKCRCGLTLCGTHRYPEQHGCGFDFKGMGREEIKKANPVVKGEKLNKI

SEQ ID NO: 580 - protein, 172 aa, Medicago truncatula
MESHDEMGCQAPERPILCVNNCGFFGREATMNMCSKCYKDTLLKQEQEKLVATSVENIVNGNSSSNGKLAVTASAVDVRVESVELNTVSPEVPENPISNESVEMKAKTGPSRCATCRKRVGLTGFSCKCGNLFCSMHRYSDKHDCPFDYRTAGQKAIAESNPVIKADKLDKI

SEQ ID NO: 581 - protein, 355 aa, Oryza sativa
MGQQVQHESRINVGEATHVSKAEMGANTMFATSRLNSNNKVGPELAYLSGVASSASDSSTAAPSPCYLCHKPAALHVFGLAGRYVFGSVKREAYLSQEGPRSGRTPNRIAESLPVRVVNDFGLRLRVVTNQGPIKPRPPRPIDAIVFASIETRNRLRGFDRSFCCSAPPETYVFLPRARETIVLRANIIKMSSEQQASAGQPVLCASGCGFYGNPATLDMCSVCYRQHCLLNGATMATGPSSSVAAASAATVATGAVTSDSCSVPSAEVNGAAFSSKNNPEPATVVEKKAPANRCASCKKKVGLLGFACRCGATYCGTHRYPEKHACGFDFKGASRDAIARANPLIKGEKLTNKI

SEQ ID NO: 582 - DNA, 951 bp, Brassica napus
gaaactcagaaaagcagagaactttattctctcctctaacctctcaacttctgctggatctctccagcagacggaagatcttcttcggagagattcttaggggaccgaacgatctatcgatcaaggcttctcgggcaaacagaagtgcagaaatggaccacgacaagacaggatgccaaagcccacccgagggtcccaagctatgcatcaacaactgcggtttcttcggaagcgctgccacaatgaacatgtgttccaagtgccacaagactatcttgtttcaacaggaacagggggccaagcttgcatctgcagtgtctggatcacccagcaacatcctaaaggaaaccttcactgctgatttggttgatgctggaaccaaatccatcgagcctgtggctgtctctgtacaagctgttgcagaggtagtagcaccagaagaagctgcagcaaaaccaaaggaagggcccagccgatgtactacttgcaacaaacgggttggtttgactggattcaaatgtcgatgtggtgacctcttctgtggtacgcaccgctatgcagacgttcataactgctctttcgattaccatgttgctgcgcaagaagctatagccaaagcgaacccggttgtgaaggcagataagcttgacaagatctgaaactcagaaactatgtttccttcttcatgtccgtgtctggttcaagcgtgtgttgatctttagcttcttccgttctctctgccagtatctgtggtgtgaaaactttctatattatcttgtgtttgcaagcagagaagtgtgctcttaaatatatatatatgctttgatgtgtttctctttttttttttttaatattatttatgagcactatggtttggttatgtttactcctttgggtctgtatcatattgagattgtaactttagctatatgaagatttttcttaaaagct

SEQ ID NO: 583 - protein, 168 aa, Brassica napus
MDHDKTGCQSPPEGPKLCINNCGFFGSAATMNMCSKCHKTILFQQEQGAKLASAVSGSPSNILKETFTADLVDAGTKSIEPVAVSVQAVAEVVAPEEAAAKPKEGPSRCTTCNKRVGLTGFKCRCGDLFCGTHRYADVHNCSFDYHVAAQEAIAKANPVVKADKLDKI

SEQ ID NO: 584 - DNA, 862 bp, Brassica napus
gattaagattcactttttattccgatagatcagattcatttcctgaatctgttatataaaattctttctaaagaggaagaaatctcacggttccaacaggaaaaatgggttctgaacagaatgatagcacgagcttcacacaatcatcagagccgaaactttgtgcaaacggatgtggtttctttggttcgccatcaaacatggatctgtgttcgaaatgctaccgagacatatgcgcagaggaagctcaaacagctgttgcaaaagctgccgttgagaaatctttcaagccatcgccatcgcctcctcctcctaccctcttcatagcagagcctgatgtggcgaaaccagagaaagaaaaggcggttgctactgttcttgtggtggccgagccatcttctgcaacaggagaagctacagttcctgaacagaacgaaccaccatctaaacctgcacggccgaaccggtgcctttgttgcaacaagaaggttggtatacttgggtttaagtgcaaatgcgggagcactttctgcggcgaacatcggtaccctgagagacatgattgcagctttgatttcaaagaagctgggcgtggagagattgcaaaagccaatccggttattaaagctgataaacttcaaaggttctgagaaaggctacggtgttggtctctcttttcttttatctcaaattgtatttgaatggaattgggtttctactagtggattgtttccaaaggggggtaacatgatgaatttggttctttaataaactcagtcatctctatttcatgctattcaggtacggattataatctttgtgggtaacttgtaaaatcaatttatcaaagcttcttttggcc

SEQ ID NO: 585 - protein, 181 aa, Brassica napus
MGSEQNDSTSFTQSSEPKLCANGCGFFGSPSNMDLCSKCYRDICAEEAQTAVAKAAVEKSFKPSPSPPPPTLFIAEPDVAKPEKEKAVATVLVVAEPSSATGEATVPEQNEPPSKPARPNRCLCCNKKVGILGFKCKCGSTFCGEHRYPERHDCSFDFKEAGRGEIAKANPVIKADKLQRF

SEQ ID NO: 586 - DNA, 807 bp, Triticum aestivum
aaccaaacgcaatatcgccctgcccctccctcttcctcgtcgacgcgcaggccccagggaaattctccgttggagaaaagtcgcgtgccgtctctcgcccacagcccgttggcagcaatggcacaagagagctggaaggagtctgaggagactgtccaaacacctgaggcaccaatattgtgtgtaaacaactgcggcttcttcggtagcagcatgacaaacaacatgtgctccaagtgctacagggacttcattaaggccacgacaatggctgcccctgtagtggagaagaaggtgttctcagtggcatcatcttccagtgtgacattggagcaagcaaaggcagatgaagtaccagccgtggctgtagctgatagccaagcagcacaggagcctccaaagccgcccagcaacagatgcctttcatgccgcaagaagataggcttgaccggtttccagtgccggtgcgggggaacattctgctccatgcaccgctacgctgactcccacgaatgcactttcgactacaagaaggctggccgggagcagattgccaagcagaaccctgttgtgatagccaagaagatcaacaagatataattgataatgacaccgggttcatttgcttgctattcgtggtggtgctggattcgtctttacttgaatcagtaggtttcttctggtctggttgctagggtctcaattgtgtctatccttctccttcatggttcgcttctctccattaagaatgaaatgaaataatgtaaatatataatattatattgttttagctgttcgtttcgtatg

SEQ ID NO: 587 - protein, 160 aa, Triticum aestivum
MAQESWKESEETVQTPEAPILCVNNCGFFGSSMTNNMCSKCYRDFIKATTMAAPVVEKKVFSVASSSSVTLEQAKADEVPAVAVADSQAAQEPPKPPSNRCLSCRKKIGLTGFQCRCGGTFCSMHRYADSHECTFDYKKAGREQIAKQNPVVIAKKINKI

SEQ ID NO: 588 - DNA, 943 bp, Triticum aestivum
gtccctggtgacgcccccaatcgagccgagctcctcgcgattcccaatccccgcacgcctcctcctccggccccgccgccgcctcgccacaggctttacagttattcaagatggaacacaaggaggcgggttgccagcagccggagggcccaatcctatgtgttaataactgtggcttctttggcagcgccgcgaccatgaacatgtgctccaagtgccacaaggagatggtcatgaaggaggagcaggccaagctggctgcctcctccttcgatagcatcgtcaacggtggcgatggtgggaaagcacctgttgttgcggctgtggccgcgagcgcagaggtggcggttgctcaagttgacgtgaaggcgcttgttgtgcagcctgctgctgatgttgcaggcaccagcgaagctgttgccgtgagccccaagaggaaggaggggccgaatcggtgctcaacttgcaggaagagggttgggctgacgggattcaactgccgatgcggtaacatgtactgttcactgcatcgctattccgacaagcatgactgccagttcgactaccggactgcagctagggatgccatcgccaaggccaacccggtggtgaaggcagagaagctcgacaagatttaggtgtcctacagggaagaaatggttgcaatctgccaaggttcatcatccgtctttgcagtgccatccttgcacctccctttcttgttggctgccgcatttcctaaattgtacggcatcgtgatgcacactgcgtcgtggcggctgcaagaactcaatcctcagtattgtggtttgcgtgttgtgtaactttattcatggtggttttttcggtcagtattgtggcttctcattttagctagctctgttatgtactattgtcccatgtgtgttaaattctgatcagtaatagtagccagcaatggttc

SEQ ID NO: 589 - protein, 175 aa, Triticum aestivum
MEHKEAGCQQPEGPILCVNNCGFFGSAATMNMCSKCHKEMVMKEEQAKLAASSFDSIVNGGDGGKAPVVAAVAASAEVAVAQVDVKALVVQPAADVAGTSEAVAVSPKRKEGPNRCSTCRKRVGLTGFNCRCGNMYCSLHRYSDKHDCQFDYRTAARDAIAKANPVVKAEKLDKI

SEQ ID NO: 590 - DNA, 897 bp, Triticum aestivum
gccccccatttcgaagcccaccgaattcctcgcgattcctctcccctcgcctcctcgtcctccccctcctaggggatcgccggagaggaatcgcgacgagggcttcctcctatcagttaaatcaaagccatggagcacaaggagaccggctgccagtctcgggagggccccatcctttgcgtcaataattgtggcttcttcggcagcgcggcgaccatgaacatgtgctccaagtgccacaaggagatggcgatgaagcaggagcaggcaaagctggccgcctcctctttcgacagcatcgtcaacggtggcgatgccgcgaaagaacatcttgctgctggcagcacggcggtggcagttgctcacgttgaggcgaagacgcttattaccgcacagcctgctgatatcgctggtccaagcgagggggcgatggagaaccccaaaggcccaagccggtgcagcacctgcagaaagagggtcgggctgaccggattcaactgccggtgtgggaacctgtactgcgcaacgcaccgttactcggacaagcacgagtgcaagtttgactaccgcgccgcggccatggacgccatcgccaaggccaacccagtggtgaaggcggagaagcttgacaagatctaggaagggtcccccctacggtcggcagaacataaggtcccaaatcaaatctgcgctacctcgtcatcgtgcgtcttgctgcattatcctttcatcatgttggcttctgcaatcttagttgttgggcaatcgtgatgcatggcacacgcgcctcggcggcagccccaggtccgaacggtctccttgttggctatgttgtgtaagctttatttatggtcgtctctctgcgcggcggaacgggaacggtattgtggctttcgc

SEQ ID NO: 591 - protein, 169 aa, Triticum aestivum
MEHKETGCQSREGPILCVNNCGFFGSAATMNMCSKCHKEMAMKQEQAKLAASSFDSIVNGGDAAKEHLAAGSTAVAVAHVEAKTLITAQPADIAGPSEGAMENPKGPSRCSTCRKRVGLTGFNCRCGNLYCATHRYSDKHECKFDYRAAAMDAIAKANPVVKAEKLDKI

SEQ ID NO: 592 - DNA, 875 bp, Triticum aestivum
tatgtatgtttcttggcaagcatagcaattgatcatcgattcgcacaaggtctctcgaaatggcgcaagagagttggaaagaggcagaggatacgggtgtccacgcgcccgaggctccgataatgtgcatcaacaactgtggcttcttcgggaaccggatgacagagaacatgtgctcaaagtgttaccgagacactgtcaaggccaagagcatggcccttctagttgagaacaaaactgccgctgctgttgcatcgtcacccacaccaatggtggcagagatcaaggatgaagcgtctgcctcagccaaagaaggaaaacgagtagccgaggaagaggcgccgaagccacccagcaaccgctgcctgtcgtgccggaagaaggtcgggctgacggggttcaagtgccgctgcggagacaccttctgctcgatgcaccgctacgccgacgcgcacgattgcaagttcgactacaagcaggccggcagggagcagatcgcccagcagaacccggtcgtcaaggctgacaaggtcaccagattctgatggaggttctgctgcaggagccctccagctcgtttattccctctatgatgatgatgatgatgcttggtccgtcaggtttacttcagaattgtgtgtctaccatcctcctggaatgtactttgccgatgaacccgccttcgacaaacaccaccaaccgatgtccgtccgacggccatcaacgggccattgcgccgggctggccgcgccttcaagggctgtataatgttggtgtttgtgtgggaggaacattcattggcacaggtgcacttctgtttatttacatatgaataatgcgaatgtaaatatttatcctttaacagtatgcagtcc

SEQ ID NO: 593 - protein, 161 aa, Triticum aestivum
MAQESWKEAEDTGVHAPEAPIMCINNCGFFGNRMTENMCSKCYRDTVKAKSMALLVENKTAAAVASSPTPMVAEIKDEASASAKEGKRVAEEEAPKPPSNRCLSCRKKVGLTGFKCRCGDTFCSMHRYADAHDCKFDYKQAGREQIAQQNPVVKADKVTRF

SEQ ID NO: 594 - DNA, 908 bp, Triticum aestivum
  misc_feature (518)..(518): y is t/u or c
  misc_feature (635)..(635): y is t/u or c
  misc_feature (699)..(699): y is t/u or c
  misc_feature (718)..(718): s is g or c
  misc_feature (727)..(727): r is g or a
  misc_feature (750)..(750): y is t/u or c
acacccacgcccatccaattctcctctcctcgacctcccgatctctcccagaccacccacctcccggccgccgccgaggacgcccggacctcccggccggcagcaaaccaaccagccacctcgtgcgtgtttgaaaaatcatggcgcagcgggatcacaagcaggaggagcccacggagctgcgggcgccggagatcacgctctgcgccaacagctgcggcttcccgggcaacccggccacgcagaacctctgccagaactgcttcttggccggcccggcgtccacgtcgccgtcttcctcctcctcctcctcctcttctctgccgggcgtgtccgcgccgacccccgtcatcgacaggccgaggccggcgccgttggaggcggagctggcacgccccgccgtcgaccttgctccggcgacggaggcgaagccggcgaggacgtcggtgaaccggtgctccagctgccggaagcgcgtggggctgacggggttccggtgccggtgcggcgacatgttytgcggcgagcaccggtactcggaccggcacgggtgcagctacgactacaaggccgccgccagggacgccatcgccagggacaaccccgtcgtgcgcgccgccaagatcgtcaggttytgaagctgaaaccaaggggaaagaagaattcataattccagccgaggcaaagcaaagaatcatytcatcgaggcagtgggccsccgtgcgarccgctagtattatgctgttgttytccggagtgtttccctttttaattaaaaaaatctttatttattggaaggaaaaaaatgggaggtaaagatgtggatgaaaaggaaagaatagcgtgtgtgatgtaatatcaacgggtggttgaggcggaggagcaagcaatgaaatggattggatgtg

SEQ ID NO: 595 - protein, 163 aa, Triticum aestivum
MAQRDHKQEEPTELRAPEITLCANSCGFPGNPATQNLCQNCFLAGPASTSPSSSSSSSSSLPGVSAPTPVIDRPRPAPLEAELARPAVDLAPATEAKPARTSVNRCSSCRKRVGLTGFRCRCGDMCGEHRYSDRHGCSYDYKAAARDAIARDNPVVRAAKIVR

SEQ ID NO: 596 - DNA, 967 bp, Triticum aestivum
gcctcgcctcctcctcctccgccccattcccccaaagcctcgactcgctcgctcgatcccgtctcctgcccacgcccggcctcccccgaggagatcaggccaccgtgcggtgcagacagggctcgccggccgtcctcgcgcgcgcgggaccgtctagcgtctctcggctcgtaggcgtcatggcgcagcgggacaagaaggtggaggagccgacggaggtgcacctgcacgccgcggagatcacgctctgcgccaacagctgcggcttcccgggcaacccggccaccaagaacctctgccagaactgcttcctggcgtcctcctcctcctcgccgtcctcctccgccgcctcaccgccgtccccttcctcctcgcccgcggccgcgttcccgctcttcgacaagccgaggccggccgccgccgcgtcgccggccgcgcccgtctacatggccgttgaccggcctgccgccgggccggcggacccgaaggcgtctaagtcgtcggtgaaccgctgccacaactgccggaagcgcgtgggcctgacggggttccgctgccggtgcggcgagatgttctgcggcgcgcaccggtactcggaccggcacgactgcagctacgactacaagtcggcggccagggacgccatcgcccgggagaaccccgtcgtgcgcgccgccaagatcgtccggttctgatcaccacgactacaaatccgaagcagcagagcccactcttttcctttctttcctttgaaaaaattaaaggcgtccccgagagtttcaaaaaaaaggagaggaaggtgggtgaaagatggcgatggggcggccacgacgaagaaacagtgcgatgataaggttgttgttgtagcggtggttggcggtggagggaagagaggagatgaggaagatggggttggtgtgtactgttgtcccacgatctctatttaattcaaatttccctattgtac

SEQ ID NO: 597 - protein, 171 aa, Triticum aestivum
MAQRDKKVEEPTEVHLHAAEITLCANSCGFPGNPATKNLCQNCFLASSSSSPSSSAASPPSPSSSPAAAFPLFDKPRPAAAASPAAPVYMAVDRPAAGPADPKASKSSVNRCHNCRKRVGLTGFRCRCGEMFCGAHRYSDRHDCSYDYKSAARDAIARENPVVRAAKIVRF

SEQ ID NO: 598 - DNA, 870 bp, Brassica napus
aaaaacaggttaacaacaacacatacacatctctctctctctctcttcttcgttttatatttccattctttttcttcatttccgccatttctgttttattttggttgccgagaaaacgcaggaactcggtgacctaattatagtctcgtcgattgtctttttcagaattttcgacgaattttattgattaataattaattaatggcggaagaacatccatgtcagacgccggaaggccaccgtctctgcgttaacaactgcggtttcttcggaagctcagccaccatgaatctctgctccaactgctacggcgacctctgcctcaagaaccagcagcaagcttccatgaaatcaaccgtcgagtcctccctctccgccgcatctcctccgtcgtcaccggagatccagtcaatctccacgtcgacgatcgcgcccgtcgtccaaatttacgcggcggagatacagatagagaaacaaatccagcagcaacggcctaatcggtgcaccgtgtgcaggaaacgggtcgggttaaccgggttcatgtgccggtgcgggacgactttctgcgggacccacaggtatccggaggttcacggatgcacgttcgatttcaaatcggctgggcgcgaggagatcgcgaaggctaacccgttggttgtagccgcgaagctccagaagatatgatctgagccgttgcttgcgttgttcaccgtgaaacatacttttatgttacggacatgtgtttacgtaattaatggttgagacagttttcattcaccttttaattattttccttttcttccggaagaattttaaagttttataattgtgtggctttgtgcttgtaaaaaaaaagattttcttttgcgg

SEQ ID NO: 599 - protein, 160 aa, Brassica napus
MAEEHPCQTPEGHRLCVNNCGFFGSSATMNLCSNCYGDLCLKNQQQASMKSTVESSLSAASPPSSPEIQSISTSTIAPVVQIYAAEIQIEKQIQQQRPNRCTVCRKRVGLTGFMCRCGTTFCGTHRYPEVHGCTFDFKSAGREEIAKANPLVVAAKLQKI

SEQ ID NO: 600 - DNA, 960 bp, Brassica napus
acaaatattcgatttttcagcagcgtcgtctctgtttccatcttctttctctttcttctcccttcccgatttcatcgttaattggtaaagaaaaaaagtcagtgaatcatctctcttcttcttcttcttctctcaagaacaggttttcggtttaaagcctcgaaattctctatggcggaagagcatcgatgtcagacgccggaaggccaccgtctctgtgctaacaactgcggcttcctcggcagctccgccaccatgaatctatgctccaactgctacggcgatctctgccttaagcaacagcaagcttccatgaaatccaccgtcgaatcctctctctccgccgtatctcctccgtcgtcagagatcggttctatgcaatccaccgttgaatcctctctctccgacgtatctcctccatcatcggagaccatttccatctcttctccaatgatccagcctctcgttcgaaacccatcagctgaactggaggtaacggcgaagaacgttccgaagacggtgactccgccgccggagcagcagcagaaacggccgaatcggtgcacgacgtgtaggaaacgggtcgggttgactgggttcaagtgccggtgcggaacgactttttgcggggctcacaggtacccggaggtccatggatgcaccttcgatttcaaatcggccggtcgcgaagagatcgccaaggcgaacccactcgtcaaagcggcgaagcttcagaagatttgatcgccgccgttcgatgcgttgacttttaaaccatcatttgaacgcgtttgtctcccccagaaatggtgttagattgatctcagccgttcatgatgtgtcattatgtaaaagatatgtactacgaaggacacgtgtcacgtgacgttttcctcatcttcccaattaattttcttttccccttaaagaaataagattattcgcgttggcttttctctc

SEQ ID NO: 601 - protein, 190 aa, Brassica napus
MAEEHRCQTPEGHRLCANNCGFLGSSATMNLCSNCYGDLCLKQQQASMKSTVESSLSAVSPPSSEIGSMQSTVESSLSDVSPPSSETISISSPMIQPLVRNPSAELEVTAKNVPKTVTPPPEQQQKRPNRCTTCRKRVGLTGFKCRCGTTFCGAHRYPEVHGCTFDFKSAGREEIAKANPLVKAAKLQKI

SEQ ID NO: 602 - DNA, 914 bp, Zea mays
ccccccccccccctgggggttttttttaaaagctggagctcmccgcggtggcggccgctctagaactagtggatcccccgggctgcaggaattcgcacgagaccattacctagaacatcctaatcgaaaaattaagattcactttttattccgatagatcagattcatttcctgaatctgttatataaaattctttctaaagaggaagaaatctcacggttccaacaggaaaaatgggttctgaacagaatgatagcacgagcttcacacaatcatcagagccgaaactttgtgcaaacggatgtggtttctttggttcgccatcaaacatggatctgtgttcgaaatgctaccgagacatatgcgcagaggaagctcaaacagctgttgcaaaagctgccgttgagaaatctttcaagccatcgccatcgcctcctcctcctaccctcttcatagcagagcctgatgtggcgaaaccagagaaagaaaaggcggttgctactgttcttgtggtggccgagccatcttctgcaacaggagaagctacagttcctgaacagaacaaaccaccatctaaacctgcacggccgaaccggtgcctttgttgcaacaagaaggttggtatacttgggtttaagtgcaaatgcgggagcactttctgcggcgaacatcggtaccctgagagacatgattgcagctttgatttcaaagaagctgggcgtggagagattgcaaaagccaatccggttattaaagctgataaacttcaaaggttctgagaaaggctacggtgttggtctctcttttcttttatctcaaattgtatttgaatggaattgggtttctactagtggattgtttccaaaggggggtaacatgatgaatttggttctttaataaactcagtcatctct

SEQ ID NO: 603 - protein, 181 aa, Zea mays
MGSEQNDSTSFTQSSEPKLCANGCGFFGSPSNMDLCSKCYRDICAEEAQTAVAKAAVEKSFKPSPSPPPPTLFIAEPDVAKPEKEKAVATVLVVAEPSSATGEATVPEQNKPPSKPARPNRCLCCNKKVGILGFKCKCGSTFCGEHRYPERHDCSFDFKEAGRGEIAKANPVIKADKLQRF

SEQ ID NO: 604 - DNA, 883 bp, Brassica napus
aacctaaattaagggatttgttctaacaaatctctctagaatccaaaagtaagaatcccgtctctctctcatcttcttctcgggaagatcagaaaacagctttttgtgaaattccatccccaagctttgaagatcgcaggaaaattctcgttttgatctgaccgtttctggtgaagaagacaggattctaaaagacaacaacaatgagctctgagcaaaacaacagcacaagcttcccaccaacagagccaaagctctgcgacaacgggtgcggattcttcgggtcaccctccaacatgaacctctgttccaaatgttaccgaagcctacgtgccgaggaagatcaaaccgcagttgcaaaagctgcggtggagaaatcacttaagcttccatcttgcaatctcatcaccgcaccagagccaaaacagcctctggagaccaaaccagcctcgttggaaaccgttgtgattgctgggacgtcttctgttcctcctgtagctacgggacaggacgagggagagccttcgaaacccacacggccgaacaggtgtttcagctgtaacaagaaggttggagttatggggttcaagtgcaagtgcggtagcacgttttgcgggagccataggtacccggagaagcatgagtgtagcttcgatttcaaagaggttggacgcggtgcaatcgcaaaggcgaatcctgtggtcaaggcggataaagtccagaggatttgatttgatgtgatgtgatctgtctatctttcagtttattccgagaatgttgatgtgatgtggtcatgttccatgttgggtttctatgaatcaaaatgaaaattgctgctattggttttctcatgaatcctttttagtgctttttaagtctattg

SEQ ID NO: 605 - protein, 175 aa, Brassica napus
MSSEQNNSTSFPPTEPKLCDNGCGFFGSPSNMNLCSKCYRSLRAEEDQTAVAKAAVEKSLKLPSCNLITAPEPKQPLETKPASLETVVIAGTSSVPPVATGQDEGEPSKPTRPNRCFSCNKKVGVMGFKCKCGSTFCGSHRYPEKHECSFDFKEVGRGAIAKANPVVKADKVQRI

SEQ ID NO: 606 - DNA, 593 bp, Brassica napus
acatagcttctctccatctctgcatctgttcttcgattcaaagtttgtgtctttttcttcctccaataggttttttgtagattttcgataatgggttcagagcaaaacgacagcttctccccttcagagccgaagctctgcgtcaacggctgcggcttcttcggatcaccatcgaacatgaacctctgctccaagtgctaccgcgacatcagagccaccgaggagcaagccgcctccgctaaagccgccgtcgacaaatctctaaaccctaacaaacctcacaccaaaccaccgcaacagagcctggagaccgctcccgagccatcctcgtcggcgagcgtcggagattcctcggatccgccgagagcgacgagatgcttgagctgtaacaagaaggtgggcgttacggggttcaagtgccggtgcgggagcactttctgtggagcccacaggtacccggagagccacgactgcgagtttgatttcaaaggagcggctagagaggctattgctaaggcgaatcctgtggtgaaagctgataaggtggagaagatatgattttgaagatggaatcgtgtttctcttttcgagtg

SEQ ID NO: 607 - protein, 155 aa, Brassica napus
MGSEQNDSFSPSEPKLCVNGCGFFGSPSNMNLCSKCYRDIRATEEQAASAKAAVDKSLNPNKPHTKPPQQSLETAPEPSSSASVGDSSDPPRATRCLSCNKKVGVTGFKCRCGSTFCGAHRYPESHDCEFDFKGAAREAIAKANPVVKADKVEKI

SEQ ID NO: 608 - protein, 174 aa, Zea mays
MEHKEAGCQAPEGPILCINNCGFFGSAATMNMCSKCHKEMITKQDQAKLAASSIDSIVNGSDAVMEPVVAGSNTVVAVAQVELQTMNVQQPADVAGPSEGVAAISKGGKVGPNRCSACRKRVGLTGFNCRCGNLYCALHRYSDKHDCKFDYRTAARDAIAKANPVVKADKLDKI

SEQ ID NO: 609 - DNA, 991 bp, Zea mays
ggtctcccccaccatccgtggcccgacgacgtccccatttccaagctcctcctcgcgattccaatccacgcacgcctcctccgcttccgcctcgctcaggcttatagtcagtgatggaacacaaggaggcgggctgccagcagccggagggcccaatcctatgcatcaataactgcggcttcttcggcagtgctgcgacgatgaacatgtgctccaagtgccacaaggagatgataacgaagcaggagcaggcccagctggctgcctcctccatcgatagcattgtcaatggcggtgacggcgggaaaggacctgtaattgctgcatctgtaaatgcggcagttcctcaagttgagcagaagactattgttgtgcagcccatgcttgtagctgaaaccagcgaggctgctgctgtaatccccaaggccaaggaaggcccagaccggtgcgcggcctgcaggaagcgtgttgggctgacgggatttagctgccgatgcgggaacatgtactgttcggtgcaccgctactccgacaaacatgactgtcagttcgactatcggactgcagcaagggacgcgattgccaaggccaatcctgtggtgagggcggagaagctcgacaagatctgaggcgggcattgggggagcgaaatggttgcaatctgcaagaattcaacatgctgtctttgctgcgttatcattgaaacttgccattcttgtctgctgctgcgtcccgtgaggttcaatactgtgatgcacacagcatccaggcagccgcaagaatttcatcaaaatggtttcccgtgttggctatgtcgtgtaagcttaattcagttattcatggtggtttcggtcggtattgtggtattcccatttaggtagctctgtaatgtattgctgtctcaagcgtgttacattccaattagtaatagtaatcagcaattgtctgccccatatattttttaaaaagtatgttcttgtgatgtcccagc

SEQ ID NO: 610 - protein, 171 aa, Zea mays
MEHKEAGCQQPEGPILCINNCGFFGSAATMNMCSKCHKEMITKQEQAQLAASSIDSIVNGGDGGKGPVIAASVNAAVPQVEQKTIVVQPMLVAETSEAAAVIPKAKEGPDRCAACRKRVGLTGFSCRCGNMYCSVHRYSDKHDCQFDYRTAARDAIAKANPVVRAEKLDKI

SEQ ID NO: 611 - DNA, 808 bp, Brassica napus
tttatttcttcttcgaaagatcagaaatatattttattttgtgaaatttcgttgaagaagctttgaaattagaggaagaaatttcatttgatctgcacgtttctgatttgagaagaagaagaaaggaacaacaatgagctctgagcaaaacaacagcacaagcttcccaccaactgagccaaaactctgcgacaacggatgcggtttcttcgggtcaccttccaacatgaacctctgttccaaatgctacagaagtctccgagccgaggaagatcaaaccgccgtagcaaaagctgctgtcaagaactcacttaagcttccatcttgcagtctcattatcacaccagagcaaaaacagcctcttgaaaccaaaccagcctctgttgttgtaaccgctgagccgtcttcagttcctatagccacgggacaggaggaggcagagccgtcgaaacctgcgcggacgaacaggtgtttaagctgtaataagaaggttggagttatggggtttaagtgcaaatgcggtagcacgttttgcgggagccataggtacccggagaagcacgagtgtagcttcgatttcaaagaagttggacgtgatgcaatctcaaaggccaatcctgtgatcaaggcggacaaagtcgaaaggatatgaaaaatatcaaaccttttcttcttataaagtaatttggggtttctattttctctgcatttgatcaacttcttctttggatgtcgatgtgatgtgatcatgttggatgttgggtttctatgaatcaaaatgaaaattgctcctcttggttttatcatg

SEQ ID NO: 612 - protein, 172 aa, Brassica napus
MSSEQNNSTSFPPTEPKLCDNGCGFFGSPSNMNLCSKCYRSLRAEEDQTAVAKAAVKNSLKLPSCSLIITPEQKQPLETKPASVVVTAEPSSVPIATGQEEAEPSKPARTNRCLSCNKKVGVMGFKCKCGSTFCGSHRYPEKHECSFDFKEVGRDAISKANPVIKADKVERI

SEQ ID NO: 613 - DNA, 598 bp, Zea mays
gacgacgcccccatttcgaagctcctcctcgcgattccaatccacgcacgccatctccgactccgcgtccgcctcgcgcaggacatatattcagtgatggaacacaaggaggccggctgccagcagccggagggcccaatcctatgcatcaataactgtggtttctttggaagcgctgccaccatgaacatgtgctccaagtgccacaaggagatgataatgaagcaggagcaggcccagttggctgcctcctccatcgatagcattgtcaatggcggtgataatgggaaaggacctgcaattgctgcaactgtaggtgtggcagttcctcaagtcgaggagaagactatcgccgtgcagcctatgcatgtcgctgaaaccagcgaggctgctgctgttatcgcgaaggccaaggaaggcccaaaccggtgcgcaacctgtaggaagcgtgttgggttgacgggttttaactgccgatgcgggaacacgtactgttcgatgcaccgctactccgacaaacacgactgccagttcgactatcgaactgcagctagggacgctatcgccaaggccaatccagtggtgaaagcggagaagc

SEQ ID NO: 614 - protein, 167 aa, Zea mays
MEHKEAGCQQPEGPILCINNCGFFGSAATMNMCSKCHKEMIMKQEQAQLAASSIDSIVNGGDNGKGPAIAATVGVAVPQVEEKTIAVQPMHVAETSEAAAVIAKAKEGPNRCATCRKRVGLTGFNCRCGNTYCSMHRYSDKHDCQFDYRTAARDAIAKANPVVKAEK

SEQ ID NO: 615 - DNA, 760 bp, Zea mays
gttgcccccacccagaccaaacccaggcttcccgttccctcgcttttgtccggcggccatggcggaggagcagcagcatcagagatggcaggagggccaccgcctgtgcgccaacaattgcggcttcttcggcagccccgcgacgctggacctctgctccaagtgctaccgcgacctataccagcagcagccagcaggcgcggcggcgggcccctccgctcccaccgcgtcggccttccagcattcctcctcggcagtctccggcgcggcggcggtctctcccgatctcgaacctcccgcgacggcccctgctggcgccaaggcgggcaggtgctccagctgccggaagcgcgtgggcctgacggggttcgcgtgccgctgcggagctaccttctgcggcgtgcaccgctacccggagcggcacgcgtgcgccttcgatttccgggccgccggccgcgacgccatcgcgcgcgccaaccccgtcgtcaagggcgataagctcaaggacaagatctgaggagcaggaaccgccgcctctcgcttcagagttcatgtcttccccccgtcagcggaactccggaagagcaaggacgaccgacggccagaagggacggatcgtcggattgtacgaattactcccgtgtactctacgattggtataaaacccaagcccgtcggttcgattgtgtaaagctggcggtgaaatcgctggccgtttactgaatgaaaaaaaattcaaatagaaaaatatttacttttc

SEQ ID NO: 616 - protein, 152 aa, Zea mays
MAEEQQHQRWQEGHRLCANNCGFFGSPATLDLCSKCYRDLYQQQPAGAAAGPSAPTASAFQHSSSAVSGAAAVSPDLEPPATAPAGAKAGRCSSCRKRVGLTGFACRCGATFCGVHRYPERHACAFDFRAAGRDAIARANPVVKGDKLKDKI

SEQ ID NO: 617 - DNA, 749 bp, Zea mays
  misc_feature (518)..(518): n is a, c, g, or t
  misc_feature (599)..(599): n is a, c, g, or t
tttttaatcccttccgccctctccgctccccgttgcccccacccagaccaaacccaggcttcccgttccctcgcttttgtccggcggccatggcggaggagcagcagcatcagagatggcaggagggccaccgcctgtgcgccaacaattgcggcttcttcggcagccccgcgacgctggacctctgctccaagtgctaccgcgacctataccagcagcagccagcaggcgcggcggcgggcccctccgctcccaccgcgtcggccttccagcattcctcctcggcagtctccggcgcggcggcggtctctcccgatctcgaacctcccgcgacggcccctgctggcgccaaggcgggcaggtgctccagctgccggaagcgcgtgggcctgacggggttcgcgtgccgctgcggagctaccttctgcggcgtgcaccgctacccggagcggcacgcgtgcgccttcgatttccgggccgccggccgcgacgccctcgcgcgcgccaaccccgtcttnaagggcgataagcccaagggacaagatctgatgagcaagaaccgcccgcttttcgcttcaaagtccatggtttgccctcgnccccgggacccccggagagcaaagaccacccgagggcataaggacggtacctctggttgtcccaattacttcccgggtcacttcgaagggttaacaatcagtcccgcccgtttttttttttagcctgcgcgacaaccctttgcgcgtttt

SEQ ID NO: 618 - protein, 210 aa, Zea mays
  misc_feature (143)..(143): Xaa can be any naturally occurring amino acid
  misc_feature (170)..(170): Xaa can be any naturally occurring amino acid
MAEEQQHQRWQEGHRLCANNCGFFGSPATLDLCSKCYRDLYQQQPAGAAAGPSAPTASAFQHSSSAVSGAAAVSPDLEPPATAPAGAKAGRCSSCRKRVGLTGFACRCGATFCGVHRYPERHACAFDFRAAGRDALARANPVXKGDKPKGQDLMSKNRPLFASKSMVCPXPRDPRRAKTTRGHKDGTSGCPNYFPGHFEGLTISPARFFF

SEQ ID NO: 619 - DNA, 588 bp, Triticum aestivum
tttcgaagcccaccgaattcctcgcgattcctctcccctcgcctcctcgtcctccccctcctaggggatcgccggagaggaatcgcgacgagggcttcctcctatcagttaaatcaaagtcatggagcacaaggagaccggctgccagtctcgtgagggccccatcctttgcgtcaataactgcggcttcttcggcagtgcggcgaccatgaacatgtgctccaagtgccacaaggagatggcgatgaagcaggagcaggccaagctggccgcctcctcttttgacagcatcgtcaacggtggtgatgccgcgaaagaacatcttgctgctggcaacacggcggtggcagttgctcacgtagaggcgaagatgcttattaccgcacagcctgctgatatcgccggtcccagtgaggcggcgatggagaaccccaaaggcccaagccggtgcagcacctgcagaaagagggtcgggctgaccggattcaactgccggtgcgggaacctctactgcgcgactcaccgttactcggacaagcatgagtgcaagtttgactaccgcgccgcggccatggacgccatcgccaa

SEQ ID NO: 620 - protein, 155 aa, Triticum aestivum
MEHKETGCQSREGPILCVNNCGFFGSAATMNMCSKCHKEMAMKQEQAKLAASSFDSIVNGGDAAKEHLAAGNTAVAVAHVEAKMLITAQPADIAGPSEAAMENPKGPSRCSTCRKRVGLTGFNCRCGNLYCATHRYSDKHECKFDYRAAAMDAIA

SEQ ID NO: 621 - DNA, 751 bp, Musa acuminata
gtgcgcccacctctttccttcaccaccctctctctcctcgcctctatctctctcctgctcctcccctatattacgatccagcctggtatcgacgctcttcccgtcccgtggagcaaagccggaaccatctgtaccctttgtctttctattgtctcaccgtcattgattcgattcggaggcaccggtcgtaacggatttgactttgttcttgttgttcttccccaaagatcgaccgagaagacaagaggatggcggaggagcagcgatgccaggagggccaccgcctctgcgctaacaactgtggattcctcgggagccctgcgacgctcaacctctgccccaaatgctaccgcgaccaccgccttaaggaggagcagcagcggcaggacgcctcgcacgcggccaacgtagccgccgccgagaaacccccccacgcgtcctcctcggcctcggtcgtggcgtccccggccgggaacgcgagagggcccccggcgctggcctctccggcggtcgcggcggcggcggcgggaccgagccggtgcgcgatgtgccggaagagggtgggcctgacggggttccggtgccggtgcggggccacccactgcggggcacaccggcacgcggagcagcacagctgcaccttcgacttcaaggcggccggccgggaggccatcacccgcgccaaccccgtcgtcaaggccgacaagctcaacaggatctgaagaatccccaccctccgtttctccctgct

SEQ ID NO: 622 - protein, 157 aa, Musa acuminata
MAEEQRCQEGHRLCANNCGFLGSPATLNLCPKCYRDHRLKEEQQRQDASHAANVAAAEKPPHASSSASVVASPAGNARGPPALASPAVAAAAAGPSRCAMCRKRVGLTGFRCRCGATHCGAHRHAEQHSCTFDFKAAGREAITRANPVVKADKLNRI

SEQ ID NO: 623 - DNA, 730 bp, Musa acuminata
attctggtctctctcaccttaactctccttttggagccctcgattccacgattccgaggcgatttccggccgctgaagggatcgtcgagcgttttgattggcggagatcgccgcaggcgaatcgcaaagagggctgatcccaaaaggagagtttgcaatggagcacgatgagaccggatgccaagcacgtgaaggaccaatcctttgcatcaacaactgtggattcttcggaagtgccgcaaccatgaacttgtgctccaagtgccacaaggacatgattctcaagcaggaacaggccaagatggcggcatcctcgatcgacagcctcgtgaatggcaatggcaatggcagtggcagtggaaaagagcccgtcgtttcgggtaatgctgttgttgctgttggctccatggagccgaaagtgatttcagcacagtcatccgatgctttagcctcaaacgaggccggagaggcaaaggcgaaggagggtccaaacaggtgtggcacctgcaggaaacgcgttggtctgactggtttcagttgtcggtgtgggaaccttttctgtgctgtgcaccgctactcggataagcacgactgccaattcgactaccgaaaggcggcccaggatgcaattgccaaagcaaaccctgtcattaaggccgaaaagcttgataagatctagagatatgggttaaaggttaatgaactctgttccgatgatctccacgttatc

SEQ ID NO: 624 - protein, 173 aa, Musa acuminata
MEHDETGCQAREGPILCINNCGFFGSAATMNLCSKCHKDMILKQEQAKMAASSIDSLVNGNGNGSGSGKEPVVSGNAVVAVGSMEPKVISAQSSDALASNEAGEAKAKEGPNRCGTCRKRVGLTGFSCRCGNLFCAVHRYSDKHDCQFDYRKAAQDAIAKANPVIKAEKLDKI

SEQ ID NO: 625 - protein, 173 aa, Prunus armeniaca
MEHEETGCQPHPEGPILCVNNCGFFGSVATRNMCSKCHKDMMLKEEQAKLAASSFGNIVNGTSNSNGNEPVVAAGVDVQAHLVEPKTISLQPSFSFGSGSGGSGEAKPEGPKRCGTCNKRVGLTGFNCRCGHLFCAVHRYSDKHDCPYDYHTAARDVIAKANPVVKADKLEKI

SEQ ID NO: 626 - DNA, 696 bp, Panicum virgatum
ctctctcgacgctcgacccggaaaaaaaaattattctccgcgggggggaaggggaaaggtcgcgtggcgtctcggtctcgcccacagtccatcggtagcaatggcacaagagagctggaaacaagagaccgaggcgactggagtccacgcgcctgaggcccctattctctgcataaacaactgtggtttctttggcagcagcatgacgaacaatatgtgctcgaagtgctacagggacttcgtcaagttgatggaagcccctgtagtggagaagaaggtgatcacgtcagcatcttcttccgcggcaccactggagacaatgcgagatgatgtgcctacagctgctgccactgaagctgtgactgagaagcaagcagagcaagagcccccaaagccgcccagcaaccggtgcctgacctgccgcaagaaggtcggactgaccggcttcctttgccgctgtgggggcaccttctgctccacgcaccgctacaccgactcccaccagtgcacctttgactacaagaaggtggcacgggagcagatagccaagcagaatccagttgtgatggccgagaagataaacaagatctgatgcatgcccgtgaagggatcgctgagttcatgcctgggtttcgagtcctcaagttcactacaatcgataggttccttcgggtggtggtctgggttagcgtggta

SEQ ID NO: 627 - protein, 163 aa, Panicum virgatum
MAQESWKQETEATGVHAPEAPILCINNCGFFGSSMTNNMCSKCYRDFVKLMEAPVVEKKVITSASSSAAPLETMRDDVPTAAATEAVTEKQAEQEPPKPPSNRCLTCRKKVGLTGFLCRCGGTFCSTHRYTDSHQCTFDYKKVAREQIAKQNPVVMAEKINKI

SEQ ID NO: 628 - DNA, 1679 bp, Panicum virgatum
gaggctcctccttgcgattccaatccccgcccgcctcctccgcctccgcgtccgcctcgcgcagggtttgggtttgctctgctcccccatctcgtgctttacctttcttttttcatgtgcgatttgtttgggaaggcttgatctgtgtcattcggggcctgattcgacgtcccttgatcgatctgcgcggttgacttgtgatgttttttgggtgttgattcgttggtgcgggcgattccacgggccgtggaatcgccaaggggacgggcgcttccagggttcgggggttgatttggtctaaggttggttgtttcttctgttcaggtggaagtcctttggggtgggggaaaatggaaacgcgttctttttttcttgttatttttttttaaaatttgtatttaaggctgtatctcctggcgaaatgattagccttacctgtatttttttggtctgatttcttaaagttcgtggggctgttaaatgttactagtgatttaagtattttgttccgtggaaatcgcgtgtatttagttgttttagatgtggattagttaaattactttgtagatttggtgcatgttgttctcgatttacatcctcatggattttttttttactttttccaaagatttgaattgatataccctgatttgtttaggaatgttgggttgatttgtattgcgcaggatactttgagatagtgacttctgcgatgcaatccctgcaaattaggatcttgtttcatcgagtgcaatccctgcatgactgatgttttctgaagttacaaaccttgtggtgatttacattgattgtttaaatgcagcttatagtagtcatggaacacaaggagacgggctgccagcaaccggagggcccaatactatgcatcaacaactgtggcttctttggcagtgcggccaccatgaacatgtgctccaagtgccacaaggagatgataatgaagcaggagcattcccagctggctgcctcctccattgatagcattgtcaatggcggtgatggtgggaaaggccctatcatagctgcaaccgcagaggtggcggttgctcaagttgaggagaggactattgttgtgcagcctccatttgtagctgaaaccagcgaggctgctgccattatccccaaggccaaggaaggtccgaaccggtgcgcaacctgtaggaagcgggttggtctgacgggattcaactgccgatgcggtaacatgtactgtgcgttgcaccgctactccgacaaacatgactgccagtttgactaccagactgcagctagggatgcgattgccaaggccaatcctgtggtgaaggcggagaagcttgaaaagatctgaagggggcaatggggaacgaaatgggttgcgttctgcaagattcaatcatgcatctttgctgctttatcattgaacatcccattcttgtttgctgccacatccctgagtcgttcaacactatgatgctcacgcatcctggcagctgcaagaagtcatcctcagtcgagtccaaaatggtttgcgtgttggctatgttgtgtaagcttattcagttattcatggtggtttcagtcggtattgtggcatttccatttaggtagctctgtaatgtactactgtctcatgcgtgttacattccaatcagtaatagtaatcagcaatggtctgc

SEQ ID NO: 629 - protein, 177 aa, Panicum virgatum
MQLIVVMEHKETGCQQPEGPILCINNCGFFGSAATMNMCSKCHKEMIMKQEHSQLAASSIDSIVNGGDGGKGPIIAATAEVAVAQVEERTIVVQPPFVAETSEAAAIIPKAKEGPNRCATCRKRVGLTGFNCRCGNMYCALHRYSDKHDCQFDYQTAARDAIAKANPVVKAEKLEKI

SEQ ID NO: 630 - DNA, 680 bp, Panicum virgatum
gcctggcccgacgacgcccccatttcgaggctcctccttgcgattccaatccccgcacgcctcctccgcctccgcgtccgcctcgcgcaggttatagtagtcatggaacacaaggagacgggctgccagcaaccggaggggccaatactatgcatcaacaactgtggcttctttggcagtgcggccaccatgaacatgtgctccaagtgccacaaggagatgataatgaagcaggagcaggcccagctggctgcctcctccattgatagcattgtcaatggcggtgacggtgggaaaggccttattatagctgcaaccgcagaggtggcggttgctcaagttgaggagaagactattgttgtgcagcctccatttgtagctgaaaccagcgaggctgctgttgttgtacccaaggccaaagaaggtccgaaccggtgtgcaagctgtaggaagcgggttggcctgacgggtttcaactgccgatgcggtaacatgtactgcgcgatgcaccgctactccgacaaacatgactgccagtttgactaccagactgcagctagggatgcgattgccaaggccaatcctgtggtgaaggcggagaagctcgacaagatctgaagggggcaatggggaacgaaatgggttgcgatctgcaagattcaagcatgcatctttgctgc

SEQ ID NO: 631 - protein, 171 aa, Panicum virgatum
MEHKETGCQQPEGPILCINNCGFFGSAATMNMCSKCHKEMIMKQEQAQLAASSIDSIVNGGDGGKGLIIAATAEVAVAQVEEKTIVVQPPFVAETSEAAVVVPKAKEGPNRCASCRKRVGLTGFNCRCGNMYCAMHRYSDKHDCQFDYQTAARDAIAKANPVVKAEKLDKI

SEQ ID NO: 632 - DNA, 937 bp, Panicum virgatum
acgacgacgcccccatttcgaggctcctccttgcgattccaatccccgcacgcatcttccgcctcgcgcaggctatagtagtcatggaacacaaggaggcgggctgccagcaaccggaggggccaatactatgcatcaacaactgtggcttctttggcagtgcggccaccatgaacatgtgctccaagtgccacaaggagatgataatgaagcaggagcaggcccagctggctgcctcctccattgatagcattgtcaatggcggtgacggtgggaaaggccttattatagctgcaaccgcagaggtggcggttgctcaagttgaggagaagactattgttgtgcagcctccatttgtagctgaaaccagcgaggctgctgtcgttatacccaaggccaaagaaggtccgaaccggtgtgcaagctgtaggaagcgggttggcctgacgggtttcaactgccgatgcggtaacatgtactgcgcgatgcaccgctactccgacaaacatgactgccagtttgactaccagactgcagctagggatgcgattgccaaggccaatcctgtggtgaaggcggagaagctcgacaagatctgaagggggcaatggggaacgaaatgggttgcgatctgcaagattcaatcatgcatctttgctgctttatcattgaacatcccattcttgtttgctgccacatccctgagttgttcaacactatgatgctcacgcatcctggcagctgcaagaactcatcctcagtcgagttcaaaatggtttgcgtgttggctatgttgtgtaagcttattcagttattcatggtggtttcagtggtttcagtcggtattgtggcattcccatttaggtagctctgtaatgtactattgtctcatgcgtgctacattccaatcagtaatagtaatcagcaatggtctgcc

SEQ ID NO: 633 - protein, 171 aa, Panicum virgatum
MEHKEAGCQQPEGPILCINNCGFFGSAATMNMCSKCHKEMIMKQEQAQLAASSIDSIVNGGDGGKGLIIAATAEVAVAQVEEKTIVVQPPFVAETSEAAVVIPKAKEGPNRCASCRKRVGLTGFNCRCGNMYCAMHRYSDKHDCQFDYQTAARDAIAKANPVVKAEKLDKI

SEQ ID NO: 634 - DNA, 750 bp, Panicum virgatum
gttggctaacaatcccattgctgcgctgcagcccatctgtagcaatggcacaggagagctggaaacaggagtccgaggagactggagtccatgcgcctgaggccccaattctgtgcataaacaactgtgttttcttcggcagcagcatgacaaacaatatgtgctcgaagtgctacagggacttcatcaagttgatggaagcccctgtggttgagaagaaggtgatcacggtggcatcttcttctgcggcaccaatggagacagcaaatcaagatgatgtgcctgcagctgctgccgctgaagctgttgcggagaagcaagcagagcaggagccgccaaagccgcccagcaaccggtgcctgacctgccgcaagaaggttgggctgaccggctttctctgccgctgtgggggcaccttctgctccatgcaccgctacaccgactcccaccagtgcacctttgactacaagaaggtggcacgggagcagattgccaagcaaaatccagttgtgatggcagagaagatcaacaagatatgatgcatggtcgtgtgcagggattgctgaattcatgcctgagttcctgagtcctcaagttcactccaaacgataggttccttcaggtggtggtctgggttagcgtggtagggggtctcaattgtgtctatccttctcctttatcatggtttcattctctcgattgtgtaataatgtaaatatattcaaactgtaatttaatcatattgcttcc

SEQ ID NO: 635 - protein, 164 aa, Panicum virgatum
MAQESWKQESEETGVHAPEAPILCINNCVFFGSSMTNNMCSKCYRDFIKLMEAPVVEKKVITVASSSAAPMETANQDDVPAAAAAEAVAEKQAEQEPPKPPSNRCLTCRKKVGLTGFLCRCGGTFCSMHRYTDSHQCTFDYKKVAREQIAKQNPVVMAEKINKI

SEQ ID NO: 636 - DNA, 727 bp, Panicum virgatum
cccggacccccacggccaccccagcccagcctgccctgcgccgcgccgcgctgtccctgacccggcggccatggcggaggagcagcagcggcagaggtggcaggagggccaccgcctgtgcgccaacaactgcggcttcttcggcagccccgccacgctggacctctgctccaagtgctaccgcgacctcaaccagaaccagcccgcccccgtgccaccgccgccggcctgcacgccgccatccgcctccgtctcagctcccgaggcgggcgccgccgcggcctcttctgcgcccgggcctccgtcgacgccccctgcgcaggccggcaggtgcgagagctgccggaagcgcgtgggcctgacggggttcgcgtgccgctgcggcgccaccttctgcggcgtgcaccggtacccggagcgccacgcgtgcgccttcgacttcggcgccgccggccgcgacgccatcgcgcgcgccaaccccatcgtcaggggcgacaagctcaaggacaaggtctgaggatcccgacgcggcgccggagggaggaggaggacggcgacccgaacgaatcgtcggactgctccgtaaagcacttccgtgtaccctgcaattggtgtagcctcctcagctgcatgtgtaacccgacgcaccgtaaagctgaaatcgaaagctaaactgatttcgaaatagagacccggatcggcggccttgctgcgttcagttgttgtg

SEQ ID NO: 637 - protein, 148 aa, Panicum virgatum
MAEEQQRQRWQEGHRLCANNCGFFGSPATLDLCSKCYRDLNQNQPAPVPPPPACTPPSASVSAPEAGAAAASSAPGPPSTPPAQAGRCESCRKRVGLTGFACRCGATFCGVHRYPERHACAFDFGAAGRDAIARANPIVRGDKLKDKV

SEQ ID NO: 638 - DNA, 1029 bp, Panicum virgatum
gccttcgcctacctctcgacgcccaaccccaaaaagaaaaattctcctcgcggagaaaggtcgcgtgccgtctcgcccacaggttggcggcgggcttcgcgtcgaggcgcggccggttggttctggatcggatctgcgcggattggaattgggttgacccggtgggtttggtggcacagggtctgcgcgcctctgttacggaggatttgggctcgcctgtgggtattttccctttaattatttgcagatcatttgcggtggtttgttttctaggctggcactggcaggcgagacctcaacctttgtgaacagcggagggggtgaatcagtgaaggatagcgagtccgtccgcgtggttgatgaacaaactttggtggttgccggcggatgtgggagtgggttcatcctggcgccgccgggtgcacgccgcggcgtgcgtggctgcttgcttgtcgcagggctcttccatccctgcgtcacatgcgagcttcgtgccaattcgtgaagcaggcgagagatgtttgctgataaggtctcctgtggcccttgtgtagggggtggatgaagcggcgagcttcctttccgtgctcggcgtgggtarccttgattgtggccagaggtttcgtgctggccatggcaaggtctattgcttggacgtgtggataaaggtttgactgcctgaattggctgtgtgcatctacctgattgcagttccgggcactgattgcttcgcctgtatgctgctggttgcctgccttgtgctgctactacatatgcaatctgtggagcaaccaaaaagaccttggcttcatgctatgattgtgtcaagcaattgactaaccacgcccatctgttgcaatggcacacgagagctggaaacaggaatctgaggagactggagtccatgcacctgaggccccaattctgtgcataaacaactgtggtttcttcggcagcagcatgacgaacaatatgtgctcgaagtgctccagggacttcatcaaattgttggaaggccctgtggtagag

SEQ ID NO: 639 - protein, 164 aa, Panicum virgatum
  misc_feature (30)..(30): Xaa can be any naturally occurring amino acid
  misc_feature (44)..(44): Xaa can be any naturally occurring amino acid
  misc_feature (51)..(51): Xaa can be any naturally occurring amino acid
MAHESWKQESEETGVHAPEAPILCINNCGXFGSSMTNNMCSKCXRDFIKLXEGPVVEKKVITVASSSAAPMETAKQDDVPAAAATEAVTEKQAEQEPPKPPSNRCLTCRKKVGLTGFLCRCGGPFCSMHRYTDSHQCTFDYKKVAREQIAKQNPVVMAEKINKI

SEQ ID NO: 640 - DNA, 576 bp, Panicum virgatum
ccctggcccgacgacgcccccatttcgaggctcctccttgcgattccaatccccgcccgcctcctccgcgtccgcctcgcgcagggtttggcttatagtagtcatggaacacaaggagacgggctgccagcaaccggagggcccaatactatgcatcaacaactgtggcttctttggcagtgcggccaccatgaacatgtgctccaagtgccacaaggagatgataatgaagcaggagcattcccagctggctgcctcctccattgatagcattgtcaatggcggtgatggtgggaaaggccctatcatagctgcaaccgtagaggtggcggttgctcaagttgaggagaagactattgttgtgcagcctccatttgtagctgaaaccagcgaggctgctgccattatccccaaggccaaggaaggtccgaaccggtgcgcaacctgtaggaagcgggttggtctgacgggattcaactgccgatgcggtaacatgtactgtgcgttgcaccgctactccgacaaacatgactgccagtttgactaccagactgcagctagggatgcgattgccaa

SEQ ID NO: 641 - protein, 157 aa, Panicum virgatum
MEHKETGCQQPEGPILCINNCGFFGSAATMNMCSKCHKEMIMKQEHSQLAASSIDSIVNGGDGGKGPIIAATVEVAVAQVEEKTIVVQPPFVAETSEAAAIIPKAKEGPNRCATCRKRVGLTGFNCRCGNMYCALHRYSDKHDCQFDYQTAARDAIA

SEQ ID NO: 642 - DNA, 688 bp, Panicum virgatum
aacccatttccttcctgcccgcaacccagcccaggcccggcggtccctcgatcctctcggctccggatcggcaagagcccagccgccgccgcccgtagccgcctcgctgccggattcacacgacacctcgtcggcgtctctttctctctctctcgaggcccatggcgcagcgcgacaagaaggtggaggagccgacggagctgcacgcgccggagctcacgctctgcgccaacagctgcggcttcccgggcaactcggccaccaagaacctctgccagaactgcttcctggccgcctccgcctccgcctccgcctccgtctcgccgccgtcgccctcctcctcctcgccggcggtgttcgacaagccgcggacggcggcggcggcggccgcccctcccgcgctctggccgccgttctccccggccgccaaccggcccccggcgggccccgcggagtccccctccaaggcgccccggacgtcgtcgtcgatcaaccggtgccacagctgccggaagcgggtcgggctgacggggttccggtgccgctgcggcgagctcttctgcggcgcgcaccggtactcggaccgccacgactgcggctacgactacaagggcgtcgcccgggacgccatcgcccgggagaaccccgtcgtgcgcgccgccaagatcgtcaggttctgagagagctg

SEQ ID NO: 643 - protein, 172 aa, Panicum virgatum
MAQRDKKVEEPTELHAPELTLCANSCGFPGNSATKNLCQNCFLAASASASASVSPPSPSSSSPAVFDKPRTAAAAAAPPALWPPFSPAANRPPAGPAESPSKAPRTSSSINRCHSCRKRVGLTGFRCRCGELFCGAHRYSDRHDCGYDYKGVARDAIARENPVVRAAKIVRF

SEQ ID NO: 644 - DNA, 1111 bp, Panicum virgatum
cccccaacccatttccttcctgcccgcaacccagcccaggcccggcggtccctcgatcctctcggctccggatcggcaagagcccagccgcagccgcccgtagccgcctcgctgccggattcacacgacgccttgtcggcgtctctctctctctcgaggcccatggcgcagcgcgacaagaaggtggaggagccgacggagctgcacgcgccggagctcacgctctgcgccaacagctgcggcttcccgggcaacccggccaccaagaacctctgccagaactgcttcctggccgcctccgcctccgtctcgccgccgtcgccctcctcctcctcgccggcggtgttcgacaagccgcggacggcggcggcggcggccgcccctcccgcgctctggccgccgttctccccggccgccaaccggcccccggcgggccccgcggagtccccctccaaggcgccccggacgtcgtcgtcgatcaaccggtgccacagctgccggaagcgggtcgggctgacggggttccggtgccgctgcggcgagctcttctgcggcgcgcaccggtactcggaccgccacgactgcggctacgactacaagggcgtcgcccgggacgccatcgcccgggagaaccccgtcgtgcgcgccgccaagatcgtcaggttctgagagagctggggagcaccggaggaccacgcacagctcagctccacgccgatcgtcgatccatcatctcccgcgctccggaatcccctctcttttttctctttttctttcctcttttgttacaaaatttaaaggtgattggtcgagctgtcatcacgctgttctcgagaatcccacaaacaagaagaagatgatttgattgatgaaggaaaaagaagaaggagcagatcatgggaaccatgaaggcagggaagctgcgagaaaaaggggatcgagagcacagtgcgatgataatgttgttgttgtagcggtggttggggtggaggggaagagatagagtcggtttggtgtgttgtcctactacaaatcacaatcttctattaaatttttcttccatctctctgtataaactaaattataattgggatctccctattgcccagct

SEQ ID NO: 645 - protein, 168 aa, Panicum virgatum
MAQRDKKVEEPTELHAPELTLCANSCGFPGNPATKNLCQNCFLAASASVSPPSPSSSSPAVFDKPRTAAAAAAPPALWPPFSPAANRPPAGPAESPSKAPRTSSSINRCHSCRKRVGLTGFRCRCGELFCGAHRYSDRHDCGYDYKGVARDAIARENPVVRAAKIVRF

SEQ ID NO: 646 - DNA, 1114 bp, Panicum virgatum
cccccaacccatttccttcctgcccgcaacccagcccaggcccggcggtccctcgatcctctcggctccggatcggcaagagcccagccgccgccgccgcccgtagccgcctcgctgccggattcacacgacacctcgtcggcgtctctttctctctctctctcgaggcccatggcgcagcgcgacaagaaggtggaggagccgacggagctgcacgcgccggagctcacgctctgcgccaacagctgcggcttcccgggcaacccggccaccaagaacctctgccagaactgcttcctggccgcctccgcctccgtctcgccgccgtcgccctcctcctcgccggcggtgttcgacaagtcgcggacggcggcggcggcggccgcccctcccgcgctctggccgccgttctccccggccgccaaccggcccccggcgggccccgcggagtccccctccaaggcgccccggacgtcgtcgtcgatcaaccggtgccacagctgccggaagcgggtcgggctgacggggttccggtgccgctgcggcgagctcttctgcggcgcgcaccggtactcggaccgccacgattgcggctacgactacaagggcgtcgcccgggacgccatcgcccgggagaaccccgtcgtgcgcgccgccaagatcgtcaggttctgagagagctggggagcaccggaggaccacgcacagctcagctccacgccgatcgtcgatccatcatctcccgcgctccggaatcccctctcttttttctctttttctttcctcttttgttacaaaatttaaaggtgattggtcgagggtgctgtcatcacgctgttctcgagaatcccacaaacaagaagaagatgatttgattgatgaaggacaaagaaggagcagatcatgggaaccatgaaggcagggaagctgcgagaaaaaggggatcgagagcacagagcgatgataatgttgttgttgtagcggtggttggggtggaggggaagagatagggtcggtttggtgtgttgtcctactacaaatcacaatcttctattaaatttttcttccatctctctgtataaactaaattataattggaatctccctattgccc

SEQ ID NO: 647 - protein, 167 aa, Panicum virgatum
MAQRDKKVEEPTELHAPELTLCANSCGFPGNPATKNLCQNCFLAASASVSPPSPSSSPAVFDKSRTAAAAAAPPALWPPFSPAANRPPAGPAESPSKAPRTSSSINRCHSCRKRVGLTGFRCRCGELFCGAHRYSDRHDCGYDYKGVARDAIARENPVVRAAKIVRF

SEQ ID NO: 648 - DNA, 1114 bp, Panicum virgatum
caacccatttccttcctgcccgcaaggccgcaacccagcccaggcccggcggtccctcgatcctctcggctccggatcggcaagagcccagccgccgccgcccgtagccgcctcgctgccggattcacacgacaccttgtcggcgtctctttctctctctcgaggcccatggcgcagcgcgacaagaaggttgaggagccgacggagctgcacgcgccggagctcacgctctgcgccaacagctgcggcttcccgggcaacccggccaccaagaacctctgccagaactgcttcctggccgcctccgcctccgtctcgccgccgtcgccctcctcctcgccggcggtgttcgacaagccgcggacggcggcggcggcggccgcccctcccgcgctctggccgccgttctccccggccgccaaccggcccccagcgggccccgcggagtccccctccaaggcgccccggacgtcgtcgtcggtcaaccggtgccacagctgccggaagcgggtcgggctgacggggttccggtgccgctgcggcgagctcttctgcggcgcgcaccggtactcggaccgccacgactgcggctacgactacaagggcgtcgcccgggacgccatcgcccgggagaaccccgtcgtgcgcgccgccaagatcgtcaggttctgagagagctggggagcaccggaggaccacgcacagctcagctccacgccgatcgtcgatccatcatctcccgcgctccggaatcccctctcttttttctctttttctttcctcttttgttacaaaatttaaaggtgattggtcgagggtgctgtcatcacgctgttctcgagaatcccacaaacaagaagaagatgatttgattgatgaaggaaaaagaagaaggagcagatcatgggagccatgaaggcagggaagctgcgagaaaaaggggatcgagagcacagtgcgatgataatgttgttgttgtagcggtggttggggtggaggggaagagatagggtcggtttggtgtgttgtcctactacaaatcacaatcttctattaaatttttcttccatctctctgtataaactaaattataattggaatctccctattgccc

SEQ ID NO: 649 - protein, 167 aa, Panicum virgatum
MAQRDKKVEEPTELHAPELTLCANSCGFPGNPATKNLCQNCFLAASASVSPPSPSSSPAVFDKPRTAAAAAAPPALWPPFSPAANRPPAGPAESPSKAPRTSSSVNRCHSCRKRVGLTGFRCRCGELFCGAHRYSDRHDCGYDYKGVARDAIARENPVVRAAKIVRF

SEQ ID NO: 650 - protein, 171 aa, Oryza sativa
MEHKETGCQQPKGPILCINNCGFFGSAATMNMCSKCHKEMIMKQEQAKLAASSIDSIVNGGDSGKEPIIAGHAEVAVAQVEVKTLVAQPAEIAGPSEGVTVNPKGREGPNRCSTCRKRVGLTGFNCRCGNLYCAMHRYSDKHDCQFDYRTAARDAIAKANPVVKAEKLDKI

SEQ ID NO: 651 - protein, 171 aa, Oryza sativa
  misc_feature (3)..(3): Xaa can be any naturally occurring amino acid
MEXQGDWMPAARRPDPLHHNCGFFGSAATMNMCSKCHKEMIMKQEQAKLAASSIDSIVNGGDSGKEPIIAGHAEVAVAQVEVKTLVAQPAEIAGPSEGVTVNPKGREGPNRCSTCRKRVGLTGFNCRCGNLYCATHRYSDKHDCQFDYRTAARDAIAKANPVVKAEKLDKI

SEQ ID NO: 652 - protein, 223 aa, Oryza sativa
MEEQQAAAAGGGGGGGGASMCANGCGFFGSEATKKLCSKCYRDQLKAAPSSPPAAPDLVANEEEEASTAAAAADEQLALCSSGCGFFGSKETNNMCSKCYRDHLKATSPLFSSSSSPATASTTDITVPIAPATTAPTPSLKGKEEEATAAASSSAAAAAKPNRCVECRKKVGLLGFECRCGGTFCSTHRHADKHACTFDFKKSDREKIAKENPLIVAPKITKF

SEQ ID NO: 653 - protein, 161 aa, Oryza sativa
MAQESWKNESEETVHTPEAPILCVNNCGFFGSSMTNNMCSKCYRDFVKVTTMAAPVVEKKAFTPASSSKTPLEPAKPDEVPAAAVEDKQAAQEPPKPPSNRCLSCRKKVGLTGFQCRCGGTFCSTHRYTEAHDCTFDYKKAGRDQIAKQNPVVIAEKINKI

SEQ ID NO: 654 - protein, 173 aa, Oryza sativa
MEHKEAGCQQPEGPILCINNCGFFGSAATMNMCSKCHKEMIMKEEQAKLAASSIDSIVNGCDGGKEHIVAASGSTAVAVAQVEAKTLVVQPTDVAGTSEEVAVVPKVKEGPNRCATCRKRVGLTGFNCRCGNMYCALHRYSDKHECQFDYRTAARDAIAKANPVVKAEKLDKI

SEQ ID NO: 655 - protein, 154 aa, Oryza sativa
MAEEQRWQEGCHRLCANNCGFFGSPATLDLCSKCYRDRQGRESTAPVVVAAAASACPATHPSSPSSSSCPAFLPSSTAAEAGVVVAAVAKASRCASCRKRVGLTGFACRCGGTFCGAHRYPERHACGFDFKAAGRDAIARANPLIKGDKLKDKI

SEQ ID NO: 656 - protein, 169 aa, Oryza sativa
MASMKRKCPDDETACGSGAGAAMCVTGCGFFGSEATNNMCSRCYREHSADNDAVEEAAAANSDLELVGVAETTTKKARMSAVVPVAVASSSSAAAEQPAAKAATAPNRCAACRKKVGLTGFKCRCGGNFCGGHRHADAHGCGFDYKSAGKEQIAKQNPLVVADKLATRI

SEQ ID NO: 657 - protein, 164 aa, Oryza sativa
MAQRDKKDQEPTELRAPEITLCANSCGFPGNPATQNLCQNCFLAATASTSSPSSLSSPVLDKQPPRPAAPLVEPQAPLPPPVEEMASALATAPAPVAKTSAVNRCSRCRKRVGLTGFRCRCGHLFCGEHRYSDRHGCSYDYKSAARDAIARDNPVVRAAKIVRF

SEQ ID NO: 658 - protein, 344 aa, Oryza sativa
MPMLSSSPICAGRDSPAAPPPDPCLPPREEAGRGEEAAVRQMGSFTRCGRSLGHAAASSPPGLTRRDGGVELGAATTPPMLKRLPPPPLDRPAPLRSPPRFLCHCLATFGWWGIDRGEMKSPIKPRPPRPIDAIVFASIETRNRLRGFDRSFCCSAPPETYVFLPRARETIVLRANIIKMSSEQQASAGQPVLCASGCGFYGNPATLDMCSVCYRQHCLLNGATMATGPSSSVAAASAATVATGAVTSDSCSVPSAEVNGAAFSSKNNPEPATVVEKKAPANRCASCKKKVGLLGFACRCGATYCGTHRYPEKHACGFDFKGASRDAIARANPLIKGEKLTNKI

SEQ ID NO: 659 - DNA, 516 bp, Sorghum bicolor
atggagcacaaggagactggatgccaggcacctgagggacccatcctttgcatcaataactgcggcttcttcggcagcgcagctaccatgaacatgtgctccaagtgccacaaggagatgataatgaagcaggagcaggccaagctggctgcctcctctatcgacagcatcgtcaatggcaacgatgctgtcatggaaccagttgttgctggcaacacagtggtcgctgctgctccaatcgagttgcaaacaatgaacgtgcagcccgctgatgttgctggacctagcgagggggcggcggtgatctccaaagggaaggtagggccgaaccggtgcagcacttgcaggaagagggttggacttacaggattcaactgccggtgtgggaacttgtactgtgcactgcaccgctactccgacaagcacgactgcaagttcgactatcggactgctgctagggatgccattgccaaggctaatccagtggtgaaggcggacaagctcgacaagatctag

SEQ ID NO: 660 - protein, 171 aa, Sorghum bicolor
MEHKETGCQAPEGPILCINNCGFFGSAATMNMCSKCHKEMIMKQEQAKLAASSIDSIVNGNDAVMEPVVAGNTVVAAAPIELQTMNVQPADVAGPSEGAAVISKGKVGPNRCSTCRKRVGLTGFNCRCGNLYCALHRYSDKHDCKFDYRTAARDAIAKANPVVKADKLDKI

SEQ ID NO: 661 - DNA, 834 bp, Sorghum bicolor
atggttcatagacaaaagaagagctcccctttctctacttttttctcaattaagaaaaatccctctctcaacatctcaaataaaagggagagcaactcccattctatcatgttggtgagcagatcaccacgtcgttcctctaggcacaccaagctcctcctcgcgattccaatccacgcacgcctcctccgcctccgcgtccgcctcgcgcaggtgatggaacacaaggaggcgggttgccagcagccggagggcccaatcctatgcatcaataactgcggtttctttggcagcgctgccaccatgaacatgtgctccaagtgccacaaggagatgataatgaagcaggagcaggcccagctggctgcctcctccattgatagcattgtcaatggtggtgatggtgggaaagggcctgtaattgccgcaactgtagatgcggcagttcctcaagttgaggagaagactattgttgtgcagcctatgcatgtagctgaaaccagcgaggctgctgctgtaatccccaaggccaaggaaggcccaaacaggtgtgcaacctgtaggaagcgtgttgggttgacaggatttaactgccgatgcgggaacatgtactgttcggtgcaccgctactccgacaaacatgactgccagttcgactatcgaactgcagctagggacgcgattgccaaggccaatcctgtggtgaaggcggagaactgcaagaattcgtccccagtcgagtccaaaatggtttgcgtgttggctatgtcgtgtaagcttattcagttattcatggtggtttcggtcggtattgtggcattcccatttaggtag

SEQ ID NO: 662 - protein, 277 aa, Sorghum bicolor
MVHRQKKSSPFSTFFSIKKNPSLNISNKRESNSHSIMLVSRSPRRSSRHTKLLLAIPIHARLLRLRVRLAQVMEHKEAGCQQPEGPILCINNCGFFGSAATMNMCSKCHKEMIMKQEQAQLAASSIDSIVNGGDGGKGPVIAATVDAAVPQVEEKTIVVQPMHVAETSEAAAVIPKAKEGPNRCATCRKRVGLTGFNCRCGNMYCSVHRYSDKHDCQFDYRTAARDAIAKANPVVKAENCKNSSPVESKMVCVLAMSCKLIQLFMVVSVGIVAFPFR

SEQ ID NO: 663 - DNA, 435 bp, Sorghum bicolor
atggcacacgagagctggaaacaagagtccgaggagactggagaggccccaattcagtgcataaacaattgtggcttcttcggcagtagcatgacaaacaagatgtgctccaagtgctataaggacttcatcaagctacacgatgctcccgccgccgccgctgccgaagccgtagtagacaacaagcaagcagaagaagcagcggcacaggagcagcagcagcccccaaacccaaagccgccgagcaaccggtgcctgagctgccgcaagaaggtgggtctgactgggttccagtgccgctgcggcgggaccttctgctccacgcaccgctacacggactctcaccagtgcaccttcgactacaagacggcggccagggagcagatcgccaagcagaaccccgtcgtgatggccgacaagatcaacaagatctga

SEQ ID NO: 664 - protein, 144 aa, Sorghum bicolor
MAHESWKQESEETGEAPIQCINNCGFFGSSMTNKMCSKCYKDFIKLHDAPAAAAAEAVVDNKQAEEAAAQEQQQPPNPKPPSNRCLSCRKKVGLTGFQCRCGGTFCSTHRYTDSHQCTFDYKTAAREQIAKQNPVVMADKINKI

SEQ ID NO: 665 - DNA, 516 bp, Sorghum bicolor
atggcggagaggcagcaggaggtctccggcggcggtgcagcggcgccgttgtgcgccaacggatgcgggttcttcgggagcgcggcgaccaagaacctctgctccaacatcaagtgcgcggcgaacgggtgcggtttcttcggatccacggcgaccaagaacatgtgctccggctgctacagggacttcctcaaagacgctcacgcctcccctgctgtggcggacaaggtcgtcctcgcggccgagcagctggcggcggtccagatctctgctgcaacctccagtgctgcaccagcggtggaggcggcgccggcggcggcgcccaccaacaggtgcgcgtcgtgccgaaagaaggtggggctgctggggttcccctgccgctgcggcggcacgttctgctccctgcaccggtacgcggagaagcacgcctgcgacttcgacttcaaggcggcgggccgggagaagatcgccaagaacaacccgctcgtcgtggcagccaagatcaacaagatctga

SEQ ID NO: 666 - protein, 171 aa, Sorghum bicolor
MAERQQEVSGGGAAAPLCANGCGFFGSAATKNLCSNIKCAANGCGFFGSTATKNMCSGCYRDFLKDAHASPAVADKVVLAAEQLAAVQISAATSSAAPAVEAAPAAAPTNRCASCRKKVGLLGFPCRCGGTFCSLHRYAEKHACDFDFKAAGREKIAKNNPLVVAAKINKI

SEQ ID NO: 667 - DNA, 582 bp, Sorghum bicolor
atggcggagaggcaggaggtctctggcggcatggcggcgccgatgtgcgccaacgcctgcgggttcttcgggagtgcggcgaccaagaacctctgctccaagtgctacaaggagcacctgatcaagaccgccaagcaggaagcatccgccgccgtcgtcgtcggcggcgccatcgtcaagtgcgcggccgacgggtgcggtttcttcggatcctcggcgaccaacaacatgtgctccggctgctacatggacttcctcaaagacgctcacgcctcccctgctgtggcggacaaggtcgtcgtactcgctgccgagaagcagccggcggcggcccagatctctgctgcaacgtccagtactgcaccggcggcggtgaaggcggcggcggcgcccaacaggtgcgcgtcgtgccgcaagaaggtggggctgctggggttcccctgccgctgcggcggcacgttctgcgcgctgcaccggtacgcggagaagcacgcctgcgacttcgacttcaaggcggcgggccgggagaagatcgccaagaacaacccgctcgtcgtggcagccaagatcaacaagatctga

SEQ ID NO: 668 - protein, 193 aa, Sorghum bicolor
MAERQEVSGGMAAPMCANACGFFGSAATKNLCSKCYKEHLIKTAKQEASAAVVVGGAIVKCAADGCGFFGSSATNNMCSGCYMDFLKDAHASPAVADKVVVLAAEKQPAAAQISAATSSTAPAAVKAAAAPNRCASCRKKVGLLGFPCRCGGTFCALHRYAEKHACDFDFKAAGREKIAKNNPLVVAAKINKI

SEQ ID NO: 669 - protein, 137 aa, Gossypium hirsutum
MAEEHRCQAPQLCANNCGFFGSPTTQNLCSECYRGLQLKEQQSSSAKQAFNHTLVPSSSSLPSSSSARSSFSASLPAKEEPSAGTKETKVVEEEEVQVTPNRCLSCKKRVGLTGFKCRCGMVFCGIHRYPGTTCLCF

SEQ ID NO: 670 - protein, 224 aa, Oryza sativa
MEEQQAAAAGGGGGGGGASMCANGCGFFGSEATKKLCSKCYRDQLKAAPSSPPAAPDLVANEEEEASTAAAAAADEQLALCSSGCGFFGSKETNNMCSKCYRDHLKATSPLFSSSSSPATASTTDITVPIAPATTAPTPSLKGKEEEATAAASSSAAAAAKPNRCVACRKKVGLLGFECRCGGTFCSTHRHADKHACTFDFKKSDREKIAKENPLIVAPKITKF

SEQ ID NO: 671 - protein, 238 aa, Oryza sativa
MATKRKCPANGDDGGVADLEPVAGGSFASRPPEKKAKLTVAVAVAVAPSSSSSATTAAAGEATAKREHGGFFAFARPENNTRLSVAVASSFSSASAAAEKAMAKLTVAGVAPSSSSASAAAAGKATAKLEYGGFCAFARPDDKTRWRVAVASSAAAAADASYSSSSPATGEQPEANRCATCRRKVGLTGFKCRCGGTFCGGHRYADEHGCGFDYKSSGRELIAKQNPVVVADKLAFRI

SEQ ID NO: 672 - protein, 180 aa, Picea sitchensis
MAQESWNREKEETGCQVPEGLIRCANNCGFFGSPATMSLCSKCYREFVLLNSPKSSFDKPQQQQIQGEVSIPRPDVGDEEIRSKYLAVDGSGPSCSTAAHQLEPQQQQNPPPPPPRQTNRCFSCRKRVGLTGFRCRCGDMFCALHRYSDKHNCTYDYKTAGREAIAKANPLVKADKILRF

SEQ ID NO: 673 - protein, 170 aa, Picea sitchensis
MAQESWKNMGEDRGRQPPGGPVLCSNKCGFFGSSATMNMCSKCYRDHFLAQTQASAVKSAVEKSLSLDIDSSKALRFDATGVRNPAEIVGSSSDDGNSVSSEEPPRVSNRCQSCRKRVGLTGFKCRCGYVFCSLHRYSDKHGCSFDYKEAGRQEIEKANPVVKAEKIQKI

SEQ ID NO: 674 - protein, 168 aa, Brassica rapa
MDHDKTGCQSPPEGPKLCINNCGFFGSAATMNMCSKCHKTILFQQEQGAKLASAVSGSPSNILKETFTAALVDAETKSIEPVAVSVQAVAEVVAPEEAAAKPKEGPSRCTTCNKRVGLTGFKCRCGDLFCGTHRYADVHNCSFDYHVAAQEAIAKANPVVKADKLDKI

SEQ ID NO: 675 - protein, 160 aa, Chlamydomonas reinhardtii
MEREQASSPQLCEKGCGFFANVGCGGMCSKCHREEARQHANAQATSSQPKPVEVAASRPVHESFPQPAAPSEAVASPVAEASTSSGDASPSATKSANPSRCLCCKKKVGLTGFKCKCGDVFCGTHRYAESHNCPFDYKTVHKEKLASNNPVVQASKVQKI

SEQ ID NO: 676 - protein, 188 aa, Physcomitrella patens
MATERVSQETTSQAPEGPVMCKNLCGFFGSQATMGLCSKCYRETVMQAKMTALAEQATQAAQATSATAAAVQPPAPVHETKLTCEVERTMIVPHQSSSYQQDLVTPAAAAPQAVKSSIAAPSRPEPNRCGSCRKRVGLTGFKCRCGNLYCALHRYSDKHTCTYDYKAAGQEAIAKANPLVVAEKVVKF

SEQ ID NO: 677 - protein, 172 aa, Physcomitrella patens
MAQYGRKPDTEETNCQVPEGPVRCTNNCGFFGSAVTMGMCSKCYRDFVLSQSRTSSAKIAGASPPVYETQEPVADRAQIQNSCLSSTQPEAAGASSGASASGQDPSRSRPNRCFSCKKRLGLTGFECRCGNLFCSAHRYSDKHSCTFDYKLAGRDSISKANPVVKADKINKI

SEQ ID NO: 678 - DNA, 902 bp, Zea mays
tatattcagtgatggaacacaaggaggccggctgccagcagccggagggcccaatcctatgcatcaataactgtggtttctttggaagcgctgccaccatgaacatgtgctccaagtgccacaaggagatgataatgaagcaggagcaggcccagttggctgcctcctccatcgatagcattgtcaatggcggtgataatgggaaaggacctgcaattgctgcaactgtaggtgtggcagttcctcaagtcgaggagaagactatcgccgtgcagcctatgcatgtcgctgaaaccagcgaggctgctgctgttatcgcgaaggccaaggaaggcccaaaccggtgcgcaacctgtaggaagcgtgttgggttgacgggttttaactgccgatgcgggaacacgtactgttcgatgcaccgctactccgacaaacacgactgccagttcgactatcgaactgcagctagggacgctatcgccaaggccaatccagtggtgaaggcggagaagcttgacaagatctgaggcgggggcattgggtaacgaaaaatggttgcgatctgcaagaattcagcatgtctctttgctgctttatcattgaacttcccattcttgtcttgctgtcacgtcccctggggttcaatactatgatgcgcacagcatcctggcagctgcaagaattcatccccagtcgagtcacgaaaatggtttgcgtgttgactatgtcgtgtaagcttattcagttattcttggtggtttgggtcggtatcgtgtcattccccgtttaggtagctctgtaatctactattctcaatttctcatgtgtgttgccttccaatcagtaatagtaatcagcaattgtctgccatatctcctacaagtatattttccagttctatt

SEQ ID NO: 679 - protein, 171 aa, Zea mays
MEHKEAGCQQPEGPILCINNCGFFGSAATMNMCSKCHKEMIMKQEQAQLAASSIDSIVNGGDNGKGPAIAATVGVAVPQVEEKTIAVQPMHVAETSEAAAVIAKAKEGPNRCATCRKRVGLTGFNCRCGNTYCSMHRYSDKHDCQFDYRTAARDAIAKANPVVKAEKLDKI

SEQ ID NO: 680 - DNA, 784 bp, Musa acuminata
acgatgagaccggatgccaagcacgtgaaggaccaatcctttgcatcaacaactgtggattcttcggaagtgccgcaaccatgaacttgtgctccaagtgccacaaggacatgattctcaagcaggaacaggccaagatggcggcatcctcgatcgacagcctcgtgaatggcaatggcaatggcagtggcagtggaaaagagcccgtcgtttcgggtaatgctgttgttgctgttggctccatggagccgaaagtgatttcagcacagtcatccgatgctttagcctcaaacgaggccggagaggcaaaggcgaaggagggtccaaacaggtgtggcacctgcaggaaacgcgttggtctgactggtttcagttgtcggtgtgggaaccttttctgtgctgtgcaccgctactcggataagcacgactgccaattcgactaccgaaaggcggcccaggatgcaattgccaaagcaaaccctgtcattaaggccgaaaagcttgataagatctagagatatgggttaaaggttaatgaactctgttccgatgatctccacgttatcatcatgccttttctttcggttggctggatgttggtgtcttttgatcctatatatatggctggaggaatgatgcatggggcatccttgcagcctctcaagaacctctatcttgttgattggaaaaggtttgcatgttggatctggtgtgtaatctttaatttgtgctggtttgcatggtggatgagtacaacgttatgctttagttaggtttgtgactt

SEQ ID NO: 681 - protein, 144 aa, Musa acuminata
MNLCSKCHKDMILKQEQAKMAASSIDSLVNGNGNGSGSGKEPVVSGNAVVAVGSMEPKVISAQSSDALASNEAGEAKAKEGPNRCGTCRKRVGLTGFSCRCGNLFCAVHRYSDKHDCQFDYRKAAQDAIAKANPVIKAEKLDKI

SEQ ID NO: 682 - DNA, 668 bp, Musa acuminata
tttttttcgaagcccaccgaattccctgcgattcctctcccctcgcctcctcgtcttcctctaggggatcgccggagaggaatcgcagagggccgtctcatccgagttaaggaagccatggagcacaaggagactggatgccaggcccccgagggacccatcctttgcatcaataactgcggcttcttcggaagcgcagctaccatgaacatgtgctccaagtgccacaaggagatgataatgaagcaggagcaggccaagctggctgcctcctctatcgacagcatcgtcaatggcaacgatgctgtcatggaaccagttgttgctggcaacacagtggtagctgttgctccagttgagttgcaaacaatgaacgtgcagcccactgatgttgctggacctagcgagggggcggcggtgatctccaaagggaaggtagggccaaaccggtgcagcacttgcaggaagagggttggacttacaggattcaactgccggtgtgggaacttgtactgtgcactccaccgctactccgacaagcatgactgcaagtttgactatcggactgctgctagggatgccattgccaaggctaatccagtggtgaaggcggacaagctcgacaagatctagggtttcctacggttggctcaggaagattgcaacct

SEQ ID NO: 683 - protein, 171 aa, Musa acuminata
MEHKETGCQAPEGPILCINNCGFFGSAATMNMCSKCHKEMIMKQEQAKLAASSIDSIVNGNDAVMEPVVAGNTVVAVAPVELQTMNVQPTDVAGPSEGAAVISKGKVGPNRCSTCRKRVGLTGFNCRCGNLYCALHRYSDKHDCKFDYRTAARDAIAKANPVVKADKLDKI

SEQ ID NO: 684 - DNA, 723 bp, Miscanthus x giganteus
catttcgaagcccaccgaactccctgcgattcctctcccctcgcctcctcgtcttcccctaggggatcgccggagaggaatcgcaaagagggccgtctcgtccgagttaaggaagccatggagcacaaggagactggatgccaggctcccatcctttgcatcaataactgcggcttcttcggcagtgcagctaccatgaacatgtgctccaagtgccacaaggagatgataacgaagcaggaccatgccaagctggctgcctcctctatcgacagcatcgtcaatggcaacgatgctgtcatggaaccagttgtttctggcaacacagtggtagctgttgctcaagttgagttgcaaacgatgaacgtgcagcccactgatgttgctggacctagcgagggggcggcggtgatctccaaagggaaggtagggccgaaccggtgcagcacttgcaggaagagggttagacttacagggttcaactgccggtgtgggaacttgtactgtgcactccaccgctactccgacaagcatgactgcaagtttgactatcggactgctgctagggatgccattgccaaggctaatccagtggtgaaggcggacaagctcgacaagatctagggtttcctacggttggctcaaggaagattgcaacctgtggtacttcttcatcatgcgggattgctgctttgcccatgcctttccctttcatgtttgctg

SEQ ID NO: 685 - protein, 168 aa, Miscanthus x giganteus
MEHKETGCQAPILCINNCGFFGSAATMNMCSKCHKEMITKQDHAKLAASSIDSIVNGNDAVMEPVVSGNTVVAVAQVELQTMNVQPTDVAGPSEGAAVISKGKVGPNRCSTCRKRVRLTGFNCRCGNLYCALHRYSDKHDCKFDYRTAARDAIAKANPVVKADKLDKI

SEQ ID NO: 686 - protein, 161 aa, Arabidopsis lyrata
MAEEHRCETPEGHRLCVNNCGFFGSSATMNLCSNCYGDLCLKQQQQASIKSTVESSRSPVIAPVLENYAAELEIPTTKTEEKKPVQNPTEQPPPPPQRPNRCTVCRKRVGLTGFMCRCGTTFCGSHRYPEVHGCTFDFKSAGREEIAKANPLVIAAKLQKI

SEQ ID NO: 687 - protein, 169 aa, Arabidopsis lyrata
MAEEHRCQTPESNRLCVNNCGFLGSSATMNLCSNCYGDLCLKQQQQSSIKSTVESSLSVSPPSSSSEIASISSPIIPPLLKTPSVKLEVPEKKPVNSPPEQNQQQRPNRCTTCRKRVGLTGFKCRCGTMYCGVHRYPEIHGCSYDFKSAGREEIAKANPLVKAAKLQKI

SEQ ID NO: 688 - DNA, 536 bp, Brassica napus
agcaaaaaaaaaaaaataagtgaatcatctttcttcatctttcttcatctctctcaagaacagattttcgacgagcttgatcgatctaaattctcaagatctatggcggaagagcatcgatgtcagacgccggaaggccaccgtctatgtgctaacaactgcggcttcctcggcagctccgccaccatgaatctctgctccaattgctacggcgatctctgtcttaagcaacagcaacaagcttccataaaaaccaccgttgaatcctctctctcctccgtatctcctccgtcgacggaggtagcttccgtctcttctccggtgatctcacctctcgttcaaaacccattagccgaactggaggtaacgacgaaaaacgttccggcgacgtttactccgccgccgcagacaacgacggaggataagcagctgaaacggccgaatcgctgcacgacgtgcaggaaacgggtcgggttaaccgggtttaagtgccggtgcgggacgactttctgcggggtccacaggtacccggaggt

SEQ ID NO: 689 - protein, 144 aa, Brassica napus
MAEEHRCQTPEGHRLCANNCGFLGSSATMNLCSNCYGDLCLKQQQQASIKTTVESSLSSVSPPSTEVASVSSPVISPLVQNPLAELEVTTKNVPATFTPPPQTTTEDKQLKRPNRCTTCRKRVGLTGFKCRCGTTFCGVHRYPE

SEQ ID NO: 690 - DNA, 615 bp, Brassica napus
atctctgtttggttgccgagaaagcggaggaaaattttcttcgctttttattaccgatctttctgttttttttcttttgttctgtttctctcggtgaccagattcctgtaaagcctcgaactttctctatggcggaagagcatcgatgccagacgccggaaggccaccgtctctgtgctaacaactgcggcttcctcggcagctccgccaccatgaatctatgctccaactgctacggcgatctctgccttaagcaacagcaagcttccatgaaatccaccgtcgaatcctctctctccgccgtatctcctccgtcgtcagagatcggctctatgcaatccaccgttgaatcctctctctccgacgtatctcctccatcaccggagaccatttccatctcctctccaatgatccagcctctcgttcgaaacccatcagctgaattggaggtaacggcgacgaagacggtgactccgccgccggagcagcagcagaaacggccgaatcggtgcacgacgtgtaggaaacgggtcgggttgaccgggttcaagtgccggtgcgggacgactttttgcggggctcacaggtacccggaagtccatggatgcaccttcg

SEQ ID NO: 691 - protein, 162 aa, Brassica napus
MAEEHRCQTPEGHRLCANNCGFLGSSATMNLCSNCYGDLCLKQQQASMKSTVESSLSAVSPPSSEIGSMQSTVESSLSDVSPPSPETISISSPMIQPLVRNPSAELEVTATKTVTPPPEQQQKRPNRCTTCRKRVGLTGFKCRCGTTFCGAHRYPEVHGCTF

SEQ ID NO: 692 - DNA, 486 bp, Brassica napus
atttctgttttattttggttgccgagaaaacgcaggaactcggtgacctaattatagtctcgtcgattgtctttttcagaattttcgacgaattttattgattaataattaattaatggcggaagaacatccatgtcagacgccggaaggccaccgtctctgcgttaacaactgcggtttcttcggaagctcagccaccatgaatctctgctccaactgctacggcgacctctgcctcaagaaccagcagcaagcttccatgaaatcaaccgtcgagtcctccctctccgccgcatctcctccgtcgtcaccggagatccagtcaatctccacgtcgacgatcgcgcccgtcgtccaaatttacgcggcggagatacagatagagaaacaaatccagcagcaacggcctaatcggtgcaccgtgtgcaggaaacgggtcgggttaaccgggttcatgtgccggtgcgggacgactttctgcgggac

SEQ ID NO: 693 - protein, 123 aa, Brassica napus
MAEEHPCQTPEGHRLCVNNCGFFGSSATMNLCSNCYGDLCLKNQQQASMKSTVESSLSAASPPSSPEIQSISTSTIAPVVQIYAAEIQIEKQIQQQRPNRCTVCRKRVGLTGFMCRCGTTFCG

SEQ ID NO: 694 - DNA, 466 bp, Brassica napus
accctttatagaaaagaaccagtgaatcatcatcatcatcatcatcatcatcatcttccttcttcttctccaaaaacagattttcgaccaaacttgatctgttctgtccaaagcttattattataatcaatggcggaagaacatcgatgccaaacgccagaaggccaccgtctctgcgttaacaactgcggtttctccggcagctcagccaccatgaacctctgctccaattgctacggcgatctctgcctcaaccaacagcaagcctcctctctccccgccgcatctcctccgtcctcatcaaagatcgaatccatctcatcgtcttcaacggcggagagacaaattaagctgatcccgtcggagcagaagcagccgccgcaacgggctaaccggtgcaccgtgtgcaggaaacgggtcgggttgaccggattcatgtgccggtgcggtacgactttctgcggga

SEQ ID NO: 695 - protein, 112 aa, Brassica napus
MAEEHRCQTPEGHRLCVNNCGFSGSSATMNLCSNCYGDLCLNQQQASSLPAASPPSSSKIESISSSSTAERQIKLIPSEQKQPPQRANRCTVCRKRVGLTGFMCRCGTTFCG

SEQ ID NO: 696 - protein, 172 aa, Ricinus communis
MAEEHRCQAQRLCVNNCGFFGSPATQNLCSKCHRDLQLKEQQSSNAKLAFSQTLSASSSSSSSSSSSPSAASVSISISSPPIVDLPEVSSKAEVVVEDKEETAAETVVRPNRCLTCRKRVGLTGFKCRCEMVFCGTHRYPEQHGCTFDFKAMGKKQIAKANPVVKAEKLEKI

SEQ ID NO: 697 - DNA, 700 bp, Glycine max; identical to SEQ ID NO: 565
  misc_feature (590)..(590): n is a, c, g, or t

SEQ ID NO: 698 - protein, 184 aa, Glycine max
  misc_feature (48)..(48): Xaa can be any naturally occurring amino acid
MAEEHRCETPEGHLLCANNCGFSGSTATMNLCSKCYGAIRLKEQEEAXSTKSTIETALSSSSLKPSFSTSPPTLVDVLIESPPPSLAEVAVTVAVEASSSISTSSGSVAQPNRCATCRKRVGLTGFKCRCGLTFCGAHRYSEKHACGFFKTVGKRGDCTCQPRDQSGEAAEDLMIRSRPFDGTR

SEQ ID NO: 699 - protein, 151 aa, Glycine max
MAEEHEFQSQEGGRHQLCANNCGFFGNSTTENYCSKCYRDIEKQKSDAKSIDSLFSPIKKVSEKKIIEPIVLTTDTMKTTTSNVVTPQSNRCLVCKKKMGLMGFRCKCGTIFCGTHRYPEVHACTFDFKSMGREAIAKANPLIKAEKLKKI

SEQ ID NO: 700 - DNA, 1498 bp, Gossypium hirsutum
aaggcccatccaaccccgatgctatcccttgcctttcttctggcttcaattcgcaccttgctctgcgaattctcaatcgttcaccatctctagagttccaaagccaaacaaagctttaaatcgaaaggcagggataggaaaagggaagccatgataacgcgatccagtttagcagatcaattaagagagtatcagcttcgatctaagcacgattgggcctctgtttcgtttttcgcatcaacctctaatctcacaacttctagagtggatgttgtggcctttgttatatgggaactcgttatattagcttttctggttttttcagccgtttctttatattttaggcatatgcaacttgcttttatcctagtatgcatcacattgttattgcttctgtgcatgaaaatcacaaagcaagtgagcttggctgggaaaaagaaaagaaggatgctgcttccattatctatgtaaaacacaaaatgataatgaatttgtctaaaaggagacagcttgttgtgtaattttgaaaattctcgatcattgcatctggcccatgctcaaaaaaaaaccccatagtggggattcctttcctttgttgcctttgccttgcctttcccttcactttttcttttattccttgtcatttcaactttaagaagaaattagttattagattagggtttcatttcttgtttaattctctctcaaactctccggtcaggtaattttctttttctttttagagaattgaaaaaaaagaagatatcagatatggcagaagaacatagatgtaaagcaccgccacaatgtacaaacaattgtagattcttcggaaacccagcaacccaaaatctttgttctcaatgttaccgccatctccagcaccttaaagaacaaggatcttcctctgctgccaaacaagcttttaatcaagccctcctcccttccttttcttcttcatcatcgtcgttttcggtttccttggcggtgaagcatgaaccgttggcggaaaccaaggaagaggtggtccaagcggaggttcaggtccacgttcaagttcgacctaacagatgcatgacttgcaagaagcgcgtggggctgacggggttcaagtgcaggtgtgggatggtgttttgtggcacccataggtaccctgaaaatcatggttgtagtttcgatttcaaagggatgggaaaacaacagattgccaaatcgaatccggttgtcaaaggcgagaagcttcagaaaatctaaaggaaaaaggggattgtttgtgattgtgttatggatggtctcgccggccgttggtgcttgtaatatgacatacattcaaatggtattttaatcttaatgcgggtgctgatttccaattggtttgttggttgcttttgcaaggaattattccaataatgaaagaaaactgctccctaataattcatactacattcttaatcattgttgttccaagttcttttatttattaagttgattttaacgg

SEQ ID NO: 701 - protein, 160 aa, Gossypium hirsutum
MAEEHRCKAPPQCTNNCRFFGNPATQNLCSQCYRHLQHLKEQGSSSAAKQAFNQALLPSFSSSSSSFSVSLAVKHEPLAETKEEVVQAEVQVHVQVRPNRCMTCKKRVGLTGFKCRCGMVFCGTHRYPENHGCSFDFKGMGKQQIAKSNPVVKGEKLQKI

SEQ ID NO: 702 - protein, 172 aa, Gossypium hirsutum
MESSKETGCQAPEGPILCINNCGFFGSAATMNMCSKCHKDMILKQEQAKFAATSIENIVNGNSSSNGKEPIATGAINVQPGSADLKVISTEASSDLSSGPSSEVKPKEGPTRCTTCRKRVGLTGFNCKCGNLFCAAHRYSDKHECPFDYKNAGRDAIAKANPVVVAEKLNKI

SEQ ID NO: 703 - protein, 151 aa, Solanum pennellii
MAEEHEFQSQEGGRHQLCANNCGFFGNSTTENYCSKCYRDIEKQKSDAKSIDSLFSPTKKVSKKKIIEPIVLMTDTVNATTSNVVTPQSNRCLVCKKKMGLMGFKCRCGTIFCGTHRYPEVHACTFDFKSMGREAIAKANPLIKAEKLRKI

SEQ ID NO: 704 - protein, 172 aa, Ricinus communis
MDHDETGCQAPPERPILCINNCGFFGSAATMNMCSKCHKDMLMKQEQSKLTASSAGSILGGSSSSSLEQLIAAGTVNIQPNVEESKPIAVQPSYISELGESVEAKPKEGPNRCNACKKRVGLTGFKCRCGNLFCASHRYSDKHDCQFDYRNAAREAIAKANPIVRAEKLDKI

SEQ ID NO: 705 - protein, 177 aa, Arabidopsis lyrata
MVLEMDHDKTGCQSPPEGPKLCINNCGFFGSAATMNMCSKCHKDMLFEQEQGAKFASAVSGTSSSSNLIKETITAALVDVETKSVEPMTVSVQPSSVQVVAEVVAPEEAAKPKGPSRCTTCNKRVGLTGFKCRCGNLFCGTHRYADIHDCSFNYHAAAQEAIAKANPVVKAEKLDKI

SEQ ID NO: 706 - protein, 170 aa, Picea sitchensis
MAQESWKNMGEDRGRQPPGGPVLCSNKCGFFGSSATMNMCSKCYRDHFLAQTQASAVKSAVEKSLSLDIDSSKALRFDASGVRNPAEVVGSSSDDGNSVSSEEPPRVSNRCQSCRKRVGLTGFKCRCGYVFCSLHRYSDKHGCSFDYKEAGRQEIEKANPVVKAEKIQKI

SEQ ID NO: 707 - protein, 174 aa, Arabidopsis lyrata
MGSEQNNSTSFPPTEPKLCDNGCGFFGSPSNMNLCSKCYRSLRAEEDQTAVAKAAVKKSLKLPSCSIIAPGQKHPLEIKPAHLETVVVTAEPSSVPVATEQDEAEPSRPVRPNRCFSCNKKVGVMGFKCKCGSTFCGNHRYPEKHECSFDFKEVGRDAIAKANPLVKADKVQRI

SEQ ID NO: 708 - DNA, 674 bp, Gossypium hirsutum
catatttaatttgcaggcaattagaataacaaaaggcggcttcgctaggcttccatttttggcctttcaattaaaaaattattgattatttattgcttgctttttgtgtttttggttccctatccatcgttgcttcttcccttcccaccctttaagattattgcctctttacgctttatttcctttgttcacattcttccttccaccttttcctttcaagaaatttagcagatcgaaagattttttctttttttaaaaatggcggaggagcatagatgccaaacgccggaaggccaccgtctttgcgttaacaactgcggctttttcggaagtccggcgacaatgaatctttgctctaaatgttatagagatttccgtcttaaagaacaacagggagctacttccatcaaatcatctctttcttcctctccttcgttttcatcttcgtcagtcgttgtcgaatccgtttctcaggttccgctgttcaatctgcctgagttcattggagaatcgccagttcctgcagtggaggttgccctggtggctgagcaacggccgcaacagcaacaaccgaatcgatgcatggtttgcaggaaacgggtcgggttgaccgggttcaggtgcaaatgcgagattacattttgcgggtcccataggtatccagagaatcacgg

SEQ ID NO: 709 - protein, 138 aa, Gossypium hirsutum
MAEEHRCQTPEGHRLCVNNCGFFGSPATMNLCSKCYRDFRLKEQQGATSIKSSLSSSPSFSSSSVVVESVSQVPLFNLPEFIGESPVPAVEVALVAEQRPQQQQPNRCMVCRKRVGLTGFRCKCEITFCGSHRYPENH

SEQ ID NO: 710 - protein, 172 aa, Solanum pennellii
MESSKETGCQAPEGPILCINNCGFFGSAATMNMCSKCHKDMILKQEQAKFAATSIENIVNGNSSSNGKEAIEIGAINVQPGSADLKVIYTEAYYDLSSGPSSEVKPKEGPTRCTTCRKRVGLTGFNCKCGNLFCAAHRYSDKHECPFDYKNAGRDAIAKANPVVVAEKLNKI

SEQ ID NO: 711 - protein, 168 aa, Brassica rapa
MDHDKTGCQSPPEGPKLCINNCGFFGSAATMNMCSKCHKTILFQQEHGAKLASAVSGSPSNILKETFTAALVDAGTKSIEPVAVSVQAVAEVVAPGESAAKPKEGPSRCTTCNKRVGLTGFKCRCGDLFCGTHRYADVHNCSFDYHTAAQEAIAKANPVVKADKLDKI

SEQ ID NO: 712 - protein, 172 aa, Vitis vinifera
MGSENKTNDETSFQPSEPILCANGCGFFGAAATMNLCSKCYRDLRIKEEQQASAKAAMNMSFNPKLLQENRTSSFSFLDTAGGSSSSSSCSFTFGNVGVGGGDKSEPKVPNRCMSCNKKVGLTGFRCKCGSTFCGAHRYPEKHECTFDFKASGRDAIAKANPVVKADKLDRL

SEQ ID NO: 713 - protein, 178 aa, Arabidopsis lyrata
MGSEQNDSTSFTQSQASEPKLCAKGCGFFGSPSNMDLCSKCYRSICAEEAQTAVVKAAVEKSFKPSPLPLPSRSLFIAEPAVVKPEPEKAVVVVSAEPSSATVPEEREPSRPARPTNRCLCCNKKVGIMGFKCKCGSTFCGDHRYPEIHDCSFDFKETGRGEIAKANPVVKADKLQRF

SEQ ID NO: 714 - protein, 175 aa, Arabidopsis thaliana
MGSEENNSTSFPPTEPKLCDNGCGFFGSPSNMNLCSKCYRSLRAEEDQTAVAKAAVKNSLKLPSCSIIAPGQKHPLEIKPAHLETVVVTAEPSSVPVAAEQDEAEPSRPVRPNNRCFSCNKKVGVMGFKCKCGSTFCGSHRYPEKHECSFDFKEVGRDAIAKANPLVKADKVQRI

SEQ ID NO: 715 - protein, 171 aa, Saccharum officinarum
MEHKETGCQAPEGPILCINNCGFFGSAATMNMCSKCHKEMIMKQEQAKLAASSIDSIVNGNDAVMEPVVSGNTVVAVAQVELQTMNVQPTDVAGPSEGAAVISKGKVGPNRCSTCRKRVGLTGFNCRCGNLYCALHRYSDKHDCKFDYRTAARDAIAKANPVVKADKLDKI

SEQ ID NO: 716 - protein, 175 aa, Arabidopsis thaliana
MGSEENNSTSFPPTEPKLCDNGCGFFGPPSNMNLCSKCYRSLRAEEDQTAVAKAAVKNSLKLPSCSIIAPGQKHPLEIKPAHLETVVVTAEPSSVPVAAEQDEAEPSRPVRPNNRCFSCNKKVGVMGFKCKCGSTFCGSHRYPEKHECSFDFKEVGRDAIAKANPLVKADKVQRI

SEQ ID NO: 717 - protein, 170 aa, Solanum pennellii
MEHDETGCQPHPEGPILCINNCGFFGSAANMNMCSKCYKDVILKQEQEKLAASSIENFVNGSTSQKGPVIVGSVDVQPALLESKSVVLSSPPSSSSGEVAELMAKEGPSRCSTCKKKVGLTGFKCRCGNFYCGSHRYSDKHDCQFDYRSAARNAIAKANPVVKAGKLDKI

SEQ ID NO: 718 - protein, 170 aa, Solanum lycopersicum
MEHDETGCQPHPEGPILCINNCGFFGSAANMNMCSKCYKDVILKQEQEKLAASSIENFVNGSTSQKGPVIVGSVDVQPALLESKSVVLSSPPSSSSGEAAELMAKEGPSRCSTCKKKVGLTGFKCRCGNFYCGSHRYSDKHDCQFDYRSAARNAIAKANPVVKAEKLDKI

SEQ ID NO: 719 - protein, 175 aa, Selaginella moellendorffii
MAQESWKREEEAAGCQLPEGPVLCANNCGFFGSVATMNLCSKCYREQSSSKAAAETMITTTTTAAAAAATPAAKEEALAAIATSRTSTTIATAATTLVTEDDSSASQEKPRLSNRCLACRKRLGLTGFKCRCGDVFCSMHRYSDKHNCSFDYKAAGREAIAKANPVVKADKIEKI

SEQ ID NO: 720 - DNA, 1067 bp, Panicum virgatum
actctcgacgctcgacccggaaaaaaaaattattctccgcgggggggaaggggaaaggtcgcgtggcgtctcggtctcgcccacagtccatcggtagcaatggcacaagagagctggaaacaagagaccgaggcgactggagtccacgcgcctgagacccctattctctgcataaacaactgtggtttctttggcagcagcatgaagaacaatatgtgttcgaagtgctacagggacttcatcaagttgatggaagcccctgtggtggagaagaaggtgatcacgtcagcatcttcttccgcggcaccactggagacaatgcgagatgatgcgcctacagctgctgccactgaagctgtgactgagaagcaagcagagcaagagcccccaaagccgcccagcaaccggtgcctgacctgccgcaagaaggtcggactgaccggcttcctttgccgctgtgggggcacattctgctccacgcaccgctacaccgactcccaccagtgcacctttgactacaagaaggtggcacgggagcagatagccaagcagaatccagttgtgatggccgagaagataaacaagatctgatgcatgcccgtgaagggattgctgagttcatgcctgggtttcgagtcctcaagttcactacaatcgataggttccttcgggtggtggtctgggttagcgtggtagtaggggatctcaattgtgtctatccttctccgttatcatggttctattctctgccggaatgatgcagtggttttgcgtcgtcacttcctcaggaagtagtttaagtcgagaagataagattgcacatcaggtattgcttattctggtcctggacggctaagtgttgtatcgacatgtcattggttttgtatcgctgtatgttatcacttgtgctggaagtcgcagcaggtatgaagcttatctgatcctgctaccatcatgtttatgtgatcagatgaagttatagataagcatatacatatcaaatctgtttatttgtgatgttggtcgtaaggtttgcaaataataagatgcagagcttttgatgaatc

SEQ ID NO: 721 - protein, 163 aa, Panicum virgatum
MAQESWKQETEATGVHAPETPILCINNCGFFGSSMKNNMCSKCYRDFIKLMEAPVVEKKVITSASSSAAPLETMRDDAPTAAATEAVTEKQAEQEPPKPPSNRCLTCRKKVGLTGFLCRCGGTFCSTHRYTDSHQCTFDYKKVAREQIAKQNPVVMAEKINKI

SEQ ID NO: 722 - protein, 171 aa, Panicum virgatum
MEHNETGCQPPREGPILCINNCGFFGSAANMNMCSKCYKDMVLKQEQAKLAVSSIENLVNGSSASEKGMVIAGPVDVQPDTIEAQSIALPSSQTSSSSDMPDVKAKVGPNRCGTCKKKVGITGFKCRCGNLYCGAHRYSDKHDCLFDYRSAGQDAIAKANPVVKAEKLDKI

SEQ ID NO: 723 - protein, 172 aa, Vitis vinifera
MDHDETGCQAHPEGPILCINNCGFFGSPATMNMCSKCHKDMMLKQEQAKLAASSIDSIVNGSSSNNGKEPAIASTVDVQVDAKEPKIISVQSSFSFGSEGSGEAKPKEGPNRCSTCKKRVGLTGFNCRCGHLFCATHRYSDKHDCPFDYRTAARDAIAKANPVVKAEKLDKI

SEQ ID NO: 724 - protein, 176 aa, Arabidopsis thaliana
MGSEQNDSTSFTQSQASEPKLCVKGCGFFGSPSNMDLCSKCYRGICAEEAQTAVAKAAVEKSFKPSPPRSLFIAEPPAVVVEPKPEKAAVVVVSAEPSSSAVPEANEPSRPARTNRCLCCNKKVGIMGFKCKCGSTFCGEHRYPETHDCSFDFKEVGRGEIAKANPVVKADKIQRF

SEQ ID NO: 725 - protein, 171 aa, Zea mays
MEHKEAGCQQPEGPILCINNCGFFGSAATMNMCSKCHKEMITKQEQAQLAASSIDSIVNGGDGGKGPVIAASVNVAVPQVEQKTIVVQPMLVAETSEAAAVIPKAKEGPDRCAACRKRVGLTGFSCRCGNMYCSVHRYSDKHDCQFDYRTAARDAIAKANPVVRAEKLDKI

SEQ ID NO: 726 - protein, 162 aa, Picea sitchensis
MAQDNWKGDSEGTGYQPQEDPILCANSCGFFGSSSTMNFCSKCFKDLVLKQALSAAVVEISSGSALGLQQPVQIADQLARPATLEQGEGTSSGEQPKPPANRCTYCKKRVGLTGFKCRCGDTFCSLHRYSETHDCLFDYRKAGRETIRKENPVVKAEKIDKI

SEQ ID NO: 727 - protein, 172 aa, Moniliophthora perniciosa
MESHDETGCQAPKGPILCINNCGFFGSAATANMCSKCHKDVILKQEQAQAAASSIESIVNRSSNENGKGPVATEKLDLQAGLVDAKVISTEPSAGSSSSKDVDMKVSDGPKRCTTCQRRVGLTGFNCKCGNLFCSTHRYSDIHGCPFDYRTAARDAIAKANPVVRADKLDKI

SEQ ID NO: 728 - protein, 169 aa, Hordeum vulgare
MEHKETGCQSREGPILCVNNCGFFGSAATMNMCSKCHKEMAMKQEQAKLAASSFDSIVNGGDAVKEHLAAGSTAVAVAHVQAKALITAQPADIAGPSEAAMESPKGPSRCSTCRKRVGLTGFNCRCGNLYCATHRYSDKHECKFDYRAAAMDAIAKANPVVKAEKLDKI

SEQ ID NO: 729 - protein, 172 aa, Medicago truncatula
MESHDEMGCQAPERPILCVNNCGFFGREATMNKCSKCYKDTLLKQEQEKLVATSVENIVNGNSSSNGKLAVTASAVDVRVESVELNTVSPEVPENPISNESVEMKAKTGPSRCATCRKRVGLTGFSCKCGNLFCSMHRYSDKHDCPFDYRTAGQKAIAESNPVIKADKLDKI

SEQ ID NO: 730 - protein, 181 aa, Oryza sativa
MEVQITVAMEHKEAGCQQPEGPILCINNCGFFGSAATMNMCSKCHKEMIMKEEQAKLAASSIDSIVNGCDGGKEHIVAASGSTAVAVAQVEAKTLVVQPTDVAGTSEEVAVVPKVKEGPNRCATCRKRVGLTGFNCRCGNMYCALHRYSDKHECQFDYRTAARDAIAKANPVVKAEKLDKI

SEQ ID NO: 731 - protein, 171 aa, Oryza sativa
MEHIETGCQPLREGPILCINNCGFFGSAANMNMCSKCYKDMVLKQEQAKLDVSSIENLVNGSSASEKGMVIAGPVDVQPDTIEAQSIALPSSQTSSSSDMPDVKAKVGPNRCGTCKKKVGITGFKCRCGNLYCGAHRYSDKHDCLFDYRSAGQDAIAKANPVVKAEKLDKI

SEQ ID NO: 732 - protein, 174 aa, Zea mays
MEHKEAGCQAPEGPILCINNCGFFGSAATMNMCSKCHKEMITKQDQAKLAASSIDSIVNGSDAVMEPVVAGSNTVVAVAQVELQTMNVQQPADVAGSSEGVAAISKGGKVGPNRCSACRKRVGLTGFNCRCGNLYCALHRYSDKHDCKFDYRTAARDAIAKANPVVKADKLDKI

SEQ ID NO: 733 - protein, 180 aa, Picea sitchensis
MAQESWNREKEETGCQVPEGLIRCANNCGFFGSPATMSLCSKCYREFVLLNSPKSSFDKPQQQQIQGEVSIPRPDVGDEEIRSKYLAVDGSGPSCSTAAHQLEPQQQQNPPPPPPRQTNRCFSCRKRVGLTGFRCRCGDMFCALHRYSDKHKCTYDYKTAGREAIAKANPLVKADKILRF

SEQ ID NO: 734 - protein, 172 aa, Physcomitrella patens
MAQYGRKQDTEETNCQPPEGPVRCTNNCGFFGSAVTMGMCSKCYRDFVLTQAKTSSAKIAETTPIVSVPKEPVADRALFQSSHFLSAQPEAAGASSGASASGQDPSRPKANRCFSCKKRVGLTGFECRCGNLFCSAHRYSDKHSCTFDYKTAGRDAISKANPVVKADKMNKI

SEQ ID NO: 735 - protein, 165 aa, Solanum pennellii
MGFEGNKFNDGTSFQPADPILCSNGCGFFGTAATKGLCSKCYRDFKMKEDHAAMAKVAMEKLVISRPQIESIGKVDFCSSTTSTVTERPVVEAATAEIGGSQPNRCFSCRKKVGFVGFKCRCGSTFCGTHRYPEKHDCTFDFKVKGKEEICKANPVVKADKIQRF

SEQ ID NO: 736 - protein, 176 aa, Hordeum vulgare
MEHKEAGCQQPEGPILCVNNCGFFGSAATMNMCSKCHKEMVMKEEQAKLAASSFDSIVNGGDGGKAPVVVAAVAASAEVAVAQVDVKALVVQPAADVAGTSEAVAVSPKRKEGPNRCSTCRKRVGLTGFNCRCGNMYCSLHRYSDKHDCQFDYRTAARDAIAKANPVVKAEKLDKI

SEQ ID NO: 737 - protein, 176 aa, Glycine max
MDHDKTGCQAPPEGPILCINNCGFFGSAATMNMCSKCHKDMLLKQEQAKLAASSIGNIMNGSSSSTEKEPVVVAAAAANVDIPVIPVEPKTVSVQPLFGSGPEGSGEAKLKDGPKRCSSCNKRVGLTGFNCRCGDLFCAVHRYSDKHNCPFDYRTAARDAIAKANPVVKAEKLDKI

SEQ ID NO: 738 - protein, 160 aa, Hordeum vulgare
MTQDSWKESEETVQTPEAPILCVNNCGFFGSSMTNNMCSKCYRDFIKATTIAAPVAEKKVFTVASSSNVTLEQAKADEVGAVPLVDSQAAQEPPKPPSNRCLSCRKKVGLTGFQCRCGGTFCSMHRYADSHECSFDYKKAGREQIAKQNPVVIGEKINKI

SEQ ID NO: 739 - protein, 169 aa, Arabidopsis lyrata
MGSEQNDGTSFSPSEPKLCVKGCGFFGSPSNMNLCSKCYRDIRATEEQTASAKAAVEKSLNPNKPKIQPQQSQEITQGVLESGSSSSSTTSGGDLAAAPLDPPKSTATRCLSCNKKVGVTGFKCKCGSTFCGTHRYPETHECEFDFKGVAREAIAKANPVVKADKVERI

SEQ ID NO: 740 - protein, 161 aa, Hordeum vulgare
MAQESWKEAEDTGVHAPEAPILCVNNCGFFGNRMTENMCSKCYRDTAKAKRMATLVENKTAAAVASSPTPLVAEMKDEASGSAKEGKQVAEEEAPKPPSNRCLSCRKKVGLTGFKCRCGDTFCSMHRYADAHDCKFDYKQAGREQIAQQNPVVKADKVTRF

SEQ ID NO: 741 - DNA, 741 bp, Sorghum bicolor
atggttcatagacaaaagaagagctcccctttctctacttttttctcaattaagaaaaatccctctctcaacatctcaaataaaagggagagcaactcccattctatcatgttggtgagcagatcaccacgtcgttcctctaggcacaccaagccggagggcccaatcctatgcatcaataactgcggtttctttggcagcgctgccaccatgaacatgtgctccaagtgccacaaggagatgataatgaagcaggagcaggcccagctggctgcctcctccattgatagcattgtcaatggtggtgatggtgggaaagggcctgtaattgccgcaactgtagatgcggcagttcctcaagttgaggagaagactattgttgtgcagcctatgcatgtagctgaaaccagcgaggctgctgctgtaatccccaaggccaaggaaggcccaaacaggtgtgcaacctgtaggaagcgtgttgggttgacaggatttaactgccgatgcgggaacatgtactgttcggtgcaccgctactccgacaaacatgactgccagttcgactatcgaactgcagctagggacgcgattgccaaggccaatcctgtggtgaaggcggagaactgcaagaattcgtccccagtcgagtccaaaatggtttgcgtgttggctatgtcgtgtaagcttattcagttattcatggtggtttcggtcggtattgtggcattcccatttaggtag

SEQ ID NO: 742 - protein, 246 aa, Sorghum bicolor
MVHRQKKSSPFSTFFSIKKNPSLNISNKRESNSHSIMLVSRSPRRSSRHTKPEGPILCINNCGFFGSAATMNMCSKCHKEMIMKQEQAQLAASSIDSIVNGGDGGKGPVIAATVDAAVPQVEEKTIVVQPMHVAETSEAAAVIPKAKEGPNRCATCRKRVGLTGFNCRCGNMYCSVHRYSDKHDCQFDYRTAARDAIAKANPVVKAENCKNSSPVESKMVCVLAMSCKLIQLFMVVSVGIVAFPFR

SEQ ID NO: 743 - DNA, 931 bp, Arabidopsis thaliana
tggttttctgttctgtcctaatttctctctggcgaaagctaagaggtttcggttacggtctccatctccgatcaaatcacgaagtttctatcggaaattttcagtgatacataccgtcagagattttctttacgagagaattgtcgccgacatactaaagcagagttttgggtgggaattagtaagatttcgactttagaattgggagatctttccattatgggttctgagcaaaacgacagcacaagcttctctccttcagagccaaagctctgcgtcaaaggatgtggcttcttcggatctccatcgaacatgaacctctgctctaaatgctacaragacatccgagccacggaggaacaaaccgcttccgctaaagccgccgtcgagaaatctctaaaccctaataaacccaaaactcaaccacaacagagccaagaaatcactcaaggcgtcctcggatctggatcgtcttcctcatcaacgagagggggtgattcggctgctgctccgttggatccaccgaaatcgacggctacgagatgcttgagctgtaacaagaaagttggcgtgacgggtttcaagtgtaggtgtggaagcactttctgtggaactcatagatatccagagagtcacgagtgccaattcgatttcaaaggagttgcgagagaagctattgctaaagctaatcctgtggtgaaggctgataaggttgataggatatgaattggtgaagaaactgttgtgttctcttttgtttttttattttcaagtctcgtgatgttggtggtttggctctctgttttctgctcttattatggttttatttgcttttagggtttcttaggaaaggccttagattctgctattatgtggtttcatgttttgcaacattggatttgttgttctgtaataaagtgttggttatatt

SEQ ID NO: 744 - protein, 168 aa, Arabidopsis thaliana
  misc_feature (40)..(40): Xaa can be any naturally occurring amino acid
MGSEQNDSTSFSPSEPKLCVKGCGFFGSPSNMNLCSKCYXDIRATEEQTASAKAAVEKSLNPNKPKTQPQQSQEITQGVLGSGSSSSSTRGGDSAAAPLDPPKSTATRCLSCNKKVGVTGFKCRCGSTFCGTHRYPESHECQFDFKGVAREAIAKANPVVKADKVDRI

SEQ ID NO: 745 - protein, 136 aa, Vitis vinifera
MESHDETGCQAPEGPILCINNCGFFGSAATMNMCSKCHKDLALKQEQAKLAASSIGSIVNGSSSGNGKEPIEGPNRCTACRKRVGLTGFNCKCGNLFCAVHRYSDKHDCPFDYRTAARDAIAKANPVVKAEKLDKI

SEQ ID NO: 746 - protein, 164 aa, Medicago truncatula
MDHDQTGCEAAPEGPMLCINNCGFFGSAATMNMCSKCHKDMMLKQEQATLAASSIGNIMNGSSSSSGIEPAITANVEISVDPVEPKIISAEPLVASGSEESLEKKPKDGPKRCSNCNKRVGLTGFNCRCGNLYCAVHRYSDKHDCPFDYRTAGRDAIAKANPCL

SEQ ID NO: 747 - protein, 188 aa, Physcomitrella patens
MATERVTQETTSQTPEGPVMCKNVCGFFGSQATMGLCSKCYRETVMQAKMTAVAEQATQAAQVLPSAASSAQPPVLMEEDKSSFEADSMLIQPPQSSSHHPVEVAPVTVAPQVVVAPVATPSRPAPNRCGSCRKRVGLTGFQCRCGHLFCALHRYSDKHSCTYDYKAAGQEAIAKANPLVVAEKVVKF

SEQ ID NO: 748 - DNA, 498 bp, Glycine max
attccatacctcaacaaaacaaggttcagagacttttccgattcctggaagaagagaagagaaaacctaaatcacagatccatggcggaagaacaccgatgtgaacctcccgaaggtcaccgactctgcgtcaacaactgcggcttcttcggtagcaccgccacgatgaacctctgctccaaatgctacagcgcgatccgtttgaaggagcaagaagaagcgtcgacgaaatccacaatcgaaaccgcgctctcttctgcctcctcggcgaaaccgtcgtcgtccacgtcacctccgccgtcggcggtcgatgtgctcatggaatctccaccgccgtctgcggcggaggttgaggttgctgtcacggtcacggtcgcggtggcgtcgagttctatttccataaactcaggttcggttgcgcaaccgaaccggtgtgccacgtgtcggaagcgcgtggggctgaccgggttcaagtgcaggtgcggagtgacgttctgc

SEQ ID NO: 749 - protein, 139 aa, Glycine max
MAEEHRCEPPEGHRLCVNNCGFFGSTATMNLCSKCYSAIRLKEQEEASTKSTIETALSSASSAKPSSSTSPPPSAVDVLMESPPPSAAEVEVAVTVTVAVASSSISINSGSVAQPNRCATCRKRVGLTGFKCRCGVTFC

SEQ ID NO: 750 - protein, 176 aa, Solanum pennellii
MAEEQRMQEGGGHRLCANNCGFFGSPTTLNLCSKCYKDHCMKEQQSRTAQLAMEKTRPQQQQQQQSESTSTYIPCTKPLPILEVSQPRETEIATRAPQVQSDTAAEVPQVQSDTVAEVPQVHTQLNDVADQAPQVQSNRCATCRKRVGLTGFKCRCGVTFCGSHRYPEHHGCTFDY

SEQ ID NO: 751 - DNA, 564 bp, Sorghum bicolor
atggccgccgcgggctccctcagccggctggcccgaggccacctggggtgcggcctgacacacaagacctggggtgtgtgttgttggctaacgataccattgctgctgtgcagccaattcttggtaacaatggcacacgagagctggaaacaagagtccgaggagactggagaggccccaattcagtgcataaacaattgtggcttcttcggcagtagcatgacaaacaagatgtgctccaagtgctataaggacttcatcaagctacacgatgctcccgccgccgccgctgccgaagccgtagtagacaacaagcaagcagaagaagcagcggcacaggagcagcagcagcccccaaacccaaagccgccgagcaaccggtgcctgagctgccgcaagaaggtgggtctgactgggttccagtgccgctgcggcgggaccttctgctccacgcaccgctacacggactctcaccagtgcaccttcgactacaagacggcggccagggagcagatcgccaagcagaaccccgtcgtgatggccgacaagatcaacaagatctga

SEQ ID NO: 752 - protein, 187 aa, Sorghum bicolor
MAAAGSLSRLARGHLGCGLTHKTWGVCCWLTIPLLLCSQFLVTMAHESWKQESEETGEAPIQCINNCGFFGSSMTNKMCSKCYKDFIKLHDAPAAAAAEAVVDNKQAEEAAAQEQQQPPNPKPPSNRCLSCRKKVGLTGFQCRCGGTFCSTHRYTDSHQCTFDYKTAAREQIAKQNPVVMADKINKI

SEQ ID NO: 753 - protein, 176 aa, Solanum lycopersicum
MAEEQRMQEGGGHRLCANNCGFFGSPTTLNLCSKCYKDHCMKEEQSRTAQLAMEKTRHQQQQQQQSESTSAYIPCTEPLSILEVSQPRETEIATRAPHVQSDTAAEVPQVQSDTVAEVPQVHTQLNDVADQAPQVQSNRCATCRRRVGLTGFKCRCGVTFCGSHRYPEHHGCTFDY

SEQ ID NO: 754 - protein, 162 aa, Physcomitrella patens
MAQDNWKQEKEETNCQAPDAPIMCTNNCGFFGSAVTLGMCSKCYRDFVLTQAKSSSGKGGEKGDTVYLGGHVGGGQTEGGGTSSGGGASASGGDACRPQAHRCFSCKKRVGLTGFKCRCGNTFCSLHRYSDKHSCTFDYKTAGRDAIAKANPVVKADKVDKI

SEQ ID NO: 755 - protein, 268 aa, Sorghum bicolor
MAERQQEVSGGGAAAPLCANGCGFFGSAATKNLCSKCYKEHLMIKTADDAAAAPVVDEKKIEVVAKAPPAAAHVMPEQLLGHQDPDDATAAVAVATATPVIAQAPTSATEKENGDPVETENHEASGGGGGGGSIKCAANGCGFFGSTATKNMCSGCYRDFLKDAHASPAVADKVVLAAEQLAAVQISAATSSAAPAVEAAPAAAPTNRCASCRKKVGLLGFPCRCGGTFCSLHRYAEKHACDFDFKAAGREKIAKNNPLVVAAKINKI

SEQ ID NO: 756 - DNA, 592 bp, Triticum aestivum
ccccccatttcgaagcccaccgaattcctcgcgattcctctcccctcgcctcctcgtcctccccctcctaggggatcgccggagaggaatcgcgacgagggcttcctcctatcagttaaatcaaagccatggagcacaaggagaccggctgccagtctcgggagggtcccatcctttgcgtcaataactgcggattctttggcagtgcggcgaccatgaacatgtgctccaagtgccacaaggagatggcgatgaagcaggagcaggccaagctggctgcctcctctttcgacagcatcgtcaacggtggcgatgccgcgaaagaacaccttgctgctggcagcacggcggtggcagttgctcacgttgaggcgaagacgcttattaccgcacagcctgctgatatcgccggtcccagcgaggcggcgatggagaaccccaaaggcccaagccggtgcagcacctgcagaaagagggttgggctgaccggattcaactgccggtgcgggaacttgtactgcgcgacgcaccgttactcggacaagcacgagtgcaagtttgactaccgcgccgcggccatggacgccatcgc

SEQ ID NO: 757 - protein, 154 aa, Triticum aestivum
MEHKETGCQSREGPILCVNNCGFFGSAATMNMCSKCHKEMAMKQEQAKLAASSFDSIVNGGDAAKEHLAAGSTAVAVAHVEAKTLITAQPADIAGPSEAAMENPKGPSRCSTCRKRVGLTGFNCRCGNLYCATHRYSDKHECKFDYRAAAMDAI

SEQ ID NO: 758 - DNA, 441 bp, Sorghum bicolor
atggcggagaggcagcaggaggtctccggcggcggtgcagcggcgccgttgtgcgccaacggatgcgggttcttcgggagcgcggcgaccaagaacctctgctccaaggacttcctcaaagacgctcacgcctcccctgctgtggcggacaaggtcgtcctcgcggccgagcagctggcggcggtccagatctctgctgcaacctccagtgctgcaccagcggtggaggcggcgccggcggcggcgcccaccaacaggtgcgcgtcgtgccgaaagaaggtggggctgctggggttcccctgccgctgcggcggcacgttctgctccctgcaccggtacgcggagaagcacgcctgcgacttcgacttcaaggcggcgggccgggagaagatcgccaagaacaacccgctcgtcgtggcagccaagatcaacaagatctga

SEQ ID NO: 759 - protein, 146 aa, Sorghum bicolor
MAERQQEVSGGGAAAPLCANGCGFFGSAATKNLCSKDFLKDAHASPAVADKVVLAAEQLAAVQISAATSSAAPAVEAAPAAAPTNRCASCRKKVGLLGFPCRCGGTFCSLHRYAEKHACDFDFKAAGREKIAKNNPLVVAAKINKI

SEQ ID NO: 760 - protein, 152 aa, Vitis vinifera
MDPPLCVNGCGFFGTPATQNLCSKCYKDFLKEEEEAAKAKTKSMEKAMGSTVASTSSVDDVVTSMTQLSLSSENTKKTISDDSSTKKKVERCETCKKKVGIIGFKCRCGSMFCAEHRLPEKHECSFDYKTMGREILKKQIPLIKPDKLEGRV

SEQ ID NO: 761 - protein, 165 aa, Oryza sativa
MSSEQQASAGQPVLCASGCGFYGNPATLDMCSVCYRQRCLLNGATMATGPSSSVAAASAATVATGAVTSDSCSVPSAEVNGAAFSSKNNPEPATVVEKKAPANRCASCKKKVGLLGFACRCGATYCGTHRYPEKHACGFDFKGASRDAIARANPLIKGEKLTNKI

SEQ ID NO: 762 - protein, 212 aa, Selaginella moellendorffii
MAQESWKCDQDETGCQPPEGPILCANNCGFFGSKATMNLCSKCYRDVVLSQAKVSTAKNALEQLPLLINNTNANNNSSAATAAAATTAATIAAATTATANATGMDQGVALDEQIVLPEAVTTSSEMNPSSGDGVADALVTSPEASGSRPPNRCNACNKRVGLTGFNCRCGNVYCALHRYSDKHNCTYDYKSVGRDAIAKANPVVKADKIDKI

SEQ ID NO: 763 - DNA, 813 bp, Panicum virgatum
ctctcgacgctcgacccgggaaaaaaaattctccgcggggggaaggggaaaggtcgcgtggtgtctcgcccacagcccatctgtagcaatggcacaggagagctggaaacaggagtccgaggagactggagtccatgcgcctgaggccccaattctgtgcataaacaactgtggtttcttcggcagcagcatgacgaacaatatgtgctcgaagtgctacagggacttcatcaagttgatggaagcccctgtggttgagaagaaggtgatcacggtggcatcttcttctgcggcaccaatggagacagcaaatcaagatgatgtgcctgcagctgctgccgctgaagctgttgcggagaagcaagcagagcaggagccgccaaagccgcccagcaaccggtgcctgacctgccgcaagaaggttgggctgaccggctttctctgccgctgtgggggcaccttctgctccatgcaccgctacaccgactcccaccagtgcacctttgactacaagaaggtggcacaggagcagattgccaagcaaaatccagttgtgatggcagagaagatcaacaagatatgatgcatggtcgtgtgtagggattgctgaattcatgcctgagttcctgagtcctcaagttcactccaaacgataggttccttcaggtggtggtctgggttagcgtggtagggggtctcaattgtgtctatccttctcctttatcatggtttcattctctcgattgtgtaataatgtaaatatattcaaactgtaatttaatcatattgcttcctacgacgattgctgggttt

SEQ ID NO: 764 - protein, 164 aa, Panicum virgatum
MAQESWKQESEETGVHAPEAPILCINNCGFFGSSMTNNMCSKCYRDFIKLMEAPVVEKKVITVASSSAAPMETANQDDVPAAAAAEAVAEKQAEQEPPKPPSNRCLTCRKKVGLTGFLCRCGGTFCSMHRYTDSHQCTFDYKKVAQEQIAKQNPVVMAEKINKI

SEQ ID NO: 765 - protein, 176 aa, Selaginella moellendorffii
MAQESWKREEEAAGCQLPEGPVLCANNCGFFGSVATMNLCSKCYREQSSSKAAETMITTTTTTAAACATATPAAKEEALAAIATSRTSTTIATGATTLVTEDDSSASQEKPRLPNRCLACRKRLGLTGFKCRCGDVFCSMHRYSDKHNCSFDYKAAGREAIAKANPVVKADKIEKI

SEQ ID NO: 766 - protein, 172 aa, Glycine max
MDHDKTGCEAPPEGPILCITNCGFFGSAATMNMCSKCHKDMMLEQEQAGLVASSIGNIMNGSSSSSGNEPAIATSVDVSVNSIEPKIIPAQPLVASGSEESDEAKPKDGPKRCSNCNKRVGLTGFNCRCGNLFCSVHRYSDKHNCPFDYHTAARDAIAKANPAVKVEKLDKI

SEQ ID NO: 767 - protein, 132 aa, Vitis vinifera
MDHDETGCQAHPEGPILCINNCGFFGSPATMNMCSKCHKDMMLKQEQAKLASSFSFGSEGSGEAKPKEGPNRCSTCKKRVGLTGFNCRCGHLFCATHRYSDKHDCPFDYRTAARDAIAKANPVVKAEKLDKI

SEQ ID NO: 768 - protein, 181 aa, Glycine max
MDHDKTGCQAPPEGPILCINNCGFFGSAATLSMCSKCHKDMMLKQEQAKLVASSIGNIMNGSSSSSGNEPVVATSVDVSVNSVESKIISAQPLVASGSDESDEAKPKDGPKRCSNCNKRVGLTGFNCRCGNLFCSEHRYSDKHNCPFDYRTAARDAIAKANPTVKLRNLLRSRLLSLSFML

SEQ ID NO: 769 - protein, 208 aa, Artificial sequence
  Aluminum tolerance-modulating polypeptide
MAQETNHSQVPMLCSTGCGFYGNPRTNGMCSVCYKEHLQRQNSSNGRISPPATSVSSLSESLPVQCTDGSVPEAQSALDSTSSSMQPSPVSNQSLLSESVASSQLDSTSVDKAVPETEDVQASVSDTAQQPSEEQSKPLEKPKQKKNRCFMCRKKVGLTGFECRCGNVYCGVHRYSDVLNCSYNYKADAAEKIRKENPVVVGEKIQKI

SEQ ID NO: 770 - protein, 170 aa, Glycine max
MESHDETGCQAPERPILCINNCGFFGRAATMNMCSKCYKDMLLKQEQDNFAASSVENIVNGSSNGNGAVTTGAVDVQVEAVEVKTVSAQSSVDSSSGESLEMKAKNSPSRCATCRKRVGLTGFSCKCGNLFCAMHRYSDKHECPFDYRTVGQDAIAKANLIVKADKLDKI

SEQ ID NO: 771 - protein, 140 aa, Arabidopsis lyrata
MTGEPSLCIRGCGFFSTSQTKNLCSKCYNDFLKDESARYLDTFNINPETAAEAAEEVTAEEETAVEAVVVKKKDKKSSSRCNACKKKVGLLGFHCRCGHMFCGSHRYPEEHSCPSDYKSAAIDVLAKQNPIVKADKLFRL

SEQ ID NO: 772 - protein, 135 aa, Vitis vinifera
MDHNETGCQAPPEAPILCINNCGFFGSAATMNMCSKCHKDLVLKQEQAKLAASSFESIVEGSSNCNAKESMGPNRCSSCRKRVGLTGFNCRCGNIFCAVHRYSDKHACPFDYRTAARDAIAKSNPVIKPEKLDKI

1-16. (canceled)

17. A plant cell comprising an exogenous nucleic acid, said exogenous nucleic acid comprising a regulatory region operably linked to a nucleotide sequence encoding a polypeptide having 90 percent or greater sequence identity to the amino acid sequence set forth in SEQ ID NO:237, and wherein a plant produced from said plant cell is tolerant of elevated soil levels of Al³⁺ as compared to that of a control plant that does not comprise said nucleic acid.

18. A plant cell comprising an exogenous nucleic acid, said exogenous nucleic acid comprising a regulatory region operably linked to a nucleotide sequence having 90 percent or greater sequence identity to the nucleotide sequence set forth in SEQ ID NO:236, and wherein a plant produced from said plant cell is tolerant of elevated soil levels of Al³⁺ as compared to that of a control plant that does not comprise said nucleic acid.

19. A transgenic plant comprising the plant cell of claim 17 or claim 18.

20. The transgenic plant of claim 19, wherein said plant is selected from the group consisting of Panicum virgatum, Sorghum bicolor, Miscanthus giganteus, Saccharum sp., Populus balsamifera, Zea mays, Glycine max, Brassica napus, Triticum aestivum, Gossypium hirsutum, Oryza sativa, Helianthus annuus, Medicago sativa, Beta vulgaris, or Pennisetum glaucum.

21. Progeny of the plant of claim 19, wherein said progeny has increased tolerance to elevated Al³⁺ conditions as compared to that of a control plant that does not comprise said nucleic acid.

22. Seed from a transgenic plant of claim 19, said seed comprising said exogenous nucleic acid.

23. Vegetative tissue from a transgenic plant of claim 19, said tissue comprising said exogenous nucleic acid.

24. A food product comprising vegetative tissue from a transgenic plant of claim 19, said tissue comprising said exogenous nucleic acid.

25. A feed product comprising vegetative tissue from a transgenic plant of claim 19, said tissue comprising said exogenous nucleic acid.
